United States Patent Application Publication US 2023/0003719 A1 - sequence listing, part 2

SEQ ID NO: 89 - DNA, 409956 bp, Homo sapiens
agtgctgaagaaagagggcactagtgtacagcccagatcgcatccttgcaccgtctggattagagctgaggcgtctgcaagccgagcgtggccacggtcctctggccccgggaccatagcgctgtctaccccgactcaggtactcaggtatgtctcaagtccatgtcctccaaacagactcaggtgagcggacacttcctccggtgaaacccacccacaacggcagacaaagtcccagtctatcagattttcctccgggtcccaggcgcattctcgcttatgtatttcttttcgtcctgtatcctcaggaagagtcgggaccaatgggtgcctgggttttctttctcctttttctgcctcacctcctgtgctctcctcgcccgctcccatagcccccttttcgtcgactctcaccttgagaaaaggagcaggggaggaacgggagagggagccaacttcagccccgcaggcggctgagatttggcgcctctgtccccaagcgggtgggtttggatatatacctgcacaagcggtgcaaggtgatgagaatgagggcggaggggcggtggggactcgagtggaagggagtgtgtgtgtgtgtgtgtgtgtgtgtgtgtgtgtgtgtgtgtgtgtatgggtaaagaactcagaggagggaggttgaaagagcaaagcgggtcagggaattgcaactcactggtcaaagcgtcccttgcaggccctgccagggaatgtctggctggaccgagcactgtccagggtcctgaaggcggcagggctcaggctgccgcggcgagagcaacccggaagctcccctccgttccctttctagcaactatgcaaaccccaaagcaagcgcaggaccccccctaacccgtccacccaccgcgggaaacaagttaccttatctgcaccccttcttcttgaacatacacagcaagcctgacttcttacgggggaaacataccaaactcctccatacggagactttaccaggcgttgccttagtaactaatgtggattttcttcaagctggcaaatttatatttacagctgattttatgtcagggcttcttcaacccctcaaaattaaagtaaaaggtgcatcctttgtttacgtttattttaaagtcgcgcttccacctttacaatgagtttccaaattttcttctgaaaaaaagttgatcttttccaatccggaaagttctcttgggttgaaggacctagctcctcccctcctctctgctcaccttccccaccgccctccaagttagaaagcatgataggttttaggggaccaggaaacgacttaaggttggaggagcgggcgagttggcggggctctgcgccgcctggacccgtgaggacagagggggcaggacaccccgccttcctcagtgaccacagctgcgctccaagctgttcctgcagccgatatcaggatgtgccgaaatgaaacggacaaggcaactgttaacattatagaccccagagttttaacacaggtcctctgatgacaaggttgtgatttttctctgtcttttgtcagcagcatctagctcaccgctgccaacacgacttccactgtactcttgatcaatttaccttgatgcactaccggtgaagaacggggactcgaattcccttacaaacgcctccagcttgtagaggcggtcgtggaggacccagaggaggagacgaaggggaaggaggcggtggtggaggaggcaaaggccttggacgaccattgttggcgaggggcaccactccgggagaggcggcgctgggcgtcttgggggtgcgcgccgggagcctgcagcgggaccagcgtgggaacgcggctggcaggctgtggacctcgtcctcaccaccatggtcgggctccttttgttttttttcccagcgatctttttggaggtgtcccttctccccagaagccccggcaggaaagtgttgctggcaggagcgtcgtctcagcgctcggtggccagaatggacggagatgtcatcattggagccctcttctcagtccatcaccagcctccggccgagaaagtgcccgagaggaagtgtggggagatcagggagcagtatggcatccagagggtggaggccatgttccacacgttggataagatcaacgcggacccggtcctcctgcccaacatcaccctgggcagtgagatccgggactcctgctggcactcttccgtggctctggaacagagcattgagttcattagggactctctgatttccattcgagatgagaaggatgggatcaaccggtgtctgcctgacggccagtccctccccccaggcaggactaagaagcccattgcgggagtgatcggtcccggctccagctctgtagccattcaagtgcagaacctgctccagctcttcgacatcccccagatcgcttattcagccacaagcatcgacctgagtgacaaaactttgtacaaatacttcctgagggttgtcccttctgacactttgcaggcaagggccatgcttgacatagtcaaacgttacaattggacctatgtctctgcagtccacacggaaggtaggcattatatttgggaaagaagggtactgagaaagtcagggcaatgcatgatgtgctcctgggatcatagtattgttcctgtttatttctagcactgtggggaacggagtttacccttctcagtactgcccacccaggcattgccttttatcctcatttccttacaattatagtgtaggaaaattgtaccccatagaatatctgaggataataggagctgaaagggtatcaaactttccatgcaaagtgtccagcagtagatttgacttgaatacttgtttgccctcatattttgagtttgcgtttggaaggcttatttgtccaaggtgttatattgcccttcagtgactggctatgactttccaggtgtaatgagttaattcagtgtgagtgattggcaaaaagaagttactattccacaaataggacttcaaagctttatctttctttaacagttgaagattttctttgtcctcttgtaccccttcttacatatccaaaactttcctgtgaatgtaggattaatgcagtcatctccctcagtatatcagaaacttatatttttacttctggagtaccttagttacaaagaaaaagtaagtaatttaaataatgtattttcttcttactttataggctaaaatcatccagattccctcactcccccaagaattatcttgttttatgagaaataacactggtgaccacttggatttgagttttggtttctagtcttttttcttctaacacaatgaacttacatattagaattaaagttagatcagttataaaatactaatgaatggatagcagatattaggtttataatgtctttctaaaatgcaatagattaacctaaggttaaaagctttgatttttccagagacttatggatgtgaattttcaaaaattttttatataaagattttctagactctcttcaccttaggttatatacattttttaataaaaggggatttctgagctcagctactcttaagtcccccagtaggtttatgaaaaagctgaagccctggttataaattaacatctaggacaattcacatgtataagctggcagaagaagacaatcttgctggtatttctgtattcatatttcttcaactcaaatgactttcaagaagccataggcatggctccatgtttttttaatatttccataatattcagttactggcgtgaggtctgattatagaaattgacagcatccatagtgaagtgattatatggttatcattattgaaaacatatactttataaagggaacagaattttcagaacaaacataaatgatataggattacacattataatttcagattttgcttttggaaaaaactatctgctgtgatattataactttataataactgacttatgcttctgaagcttgatttttaatcatgaactgcgtatctctttttgaacaaaaattcattacttttttaagactcaaagtattaattccttatattttaatatttaactttactacatgttaatgtttagcatagtttctttagtgcttgcttaaatgaaacatcctgaaagagcaagttaaaatgtgttaaatatcatcattggatagatccaaagatgatggcaaagagaatggcaaaatctagattgaatgtgatttatttaaatatttaataatatttcccccattgagctagataattgattattaatattggaagtataaattctttcttcaggaagaagtaatgcttcattatttttaaacagtggttttattttccatatttcattataagattgttttatttggtgagaggtggctaatagtgggttgctttctgaggagtagaattatgtttttggaaaatgaattgaacatgttttcactaattttgctgcgaaaggactaatattataattttgcccatgtgttagtttggattactatgtttcctttctgccttctgattggtgttgtatggcaaagacaatgtctccgtactattatagtaattgattccagactacattgtgttcacagaacagcatcatagaaatatgtggggtttattttattaccaagcagttacaccattcaccttgccattcatatataataccttgtttcttctcaaagggaattagttacttctcttattaaacgtaacatctgtaaaaactaaattgcatttctttccttctatctggaaaggaattttgtgtaaggtcccactgaagattcatttttcctgaggttttgccctcctgcttttcagggccccatagtgtactggcctacaggcacttccttggatcatttagtaattttactgctttcagactgatggggtcgcttattggtgacagttccctgtcaaatagcagagaagaccacatatcagggttgtctctgtcgtctgagcactattcagcaaggaagccagtttgtctggatattggcaacttagggcttagaaattctggggcctctcgtgaccttcatctctcctttccaaatcagccattccctagtcaattcattatcatcgtttcttgtattagaagttaaccaagaatagttaataccaaaagcactaagtgactggactagtgtaccttcatttctgtagttaattgtgagattatcttgaaatcatattgtttttgaatggtacagttgtttttatattacttttttttatattgaagctaaacttgcagatattttctgttttgttttgtgttttaaccagttacaatttagtttttatattctcttacattcttttcaatcttatatcatattatttgtaccacacttgatacatgacaattatcaatttacataaaatgaaagaaaatcagtacacataaagttacctgcaatgcaatagactctccagaaattgttcatgattagctctggaggcaaatgttaagatgagcctgtcaagggggaggcaggatattggagtaatggagccttatccacaaataaagtttgaatgcactttggagcaagctgcctacctggaatgtgagtctttaaatatgctaagtatatagtagagaaatagcctaccactgataagaatatctcagccaaggacactatattttgttcttctgataaaatacagattccccgtcaaaaaaacaaatttattatttcaaatgatttttgaaaacagtacttaaaaataactgtagttaataaaattcaaagcattgaacaagtccaataaaaatgttctttgagtatgtagctacaagaattttttttgagtggataaattttcattcattacttttatgtatttatttatttatcttaagcctttcttctagtattttgtctcagttacttagataagtattgatataataatgaatttagtgatgctgcttcccttattaaaatatccactttaaggtaaacttttctttccagttagattttgatcttggtgtgacatttttttgacatttgcttacattttatataaaattggcctttttgagcttctttccaaaatctgattttttcctttttaagtacttttttatttgatataaaacaattaaaaagtctaatgacatcagaaaaaagtcctcctaagtcataaatacatactttgattaatgcaattacctgtaataattttatatctactaaatatcatatttcctatctatgtaccagtaactttctatatatctttcttgtcttgattgcaacctacttcaaaggaaattatcttaatacattgctcattttatcatatagtaagaaataggagtgttttgaaaggttattcaggccaactaataaaagatgcttagaacatcacattacgtgcttgcccacgctcaaagctttctaattgtgattagggtttctaattagagtaggagtatatcggagttaaattgagagcagaatttcacctgacttttagtcagttcttctatgtaatgacctaaaacagatttcttgaagtttccaccaatccttcattgaagactaggagtcatccaaaacattcaagcttcttttccatgtgacatttatcatcaatgaataatctctcttttgtagtgtagctctccagttccttcactcatgcatttcattttttacttcccttaccatcatagctgactagagtagatcttacatcaattaacatcccaaggtcttttcagaagtgctgctattaatccatatctccttccttttatgcttgaacagttattaattttgttactgttaccattagattcaagaggaggacttgaattttttccctttaaatgtaaaattattagcttcaatctgcctttctaacatcagtaagttctgggattttgattgtttaatttatcttagtattccagctttgtgtctccaggatttaaccatatacgttaaaacctgaataagataagggtcgaaagtaaagtctcaaaccctttcacgagcaaactacctggctaattctggtgttcactcagcctattatgaatttcttctatacagtgcttttcctcctcttactatactaccttgcaaatgtataaatggctatatgtagtttaaatgaaaagtcatcacaacagatgactttaagtaaagatttactgcataaaaactttaaataacaattttgaagacttaatttcggttactaagtagtttttactttaaggggagtgcagtttaaatacatgtaaagtaagtaaaagcaatcacagtatagacatttataaacatgagtttattcaattgtagggaactgaaagaatgtattagtggtgcaattatctagagaaaacctggagaaaagggaattttggttagagttttgtttggaaacatagcatttgtaaaagagacagtattgaaagtactgtaatggtgtgaaaaaaacagatttgcttatctggaggaaagagtctggggtaagaactaataataaaaacagaagtaagtcctaatattctgtgattacatcagtctttatagacatgaaggacaagtaatggagaatcttgaagcatgtgacaaagagttttggtttcaagaaagatacatccaagcacagttagacatgtgaactttggccaagagaacatatattattggcaaaagttggtgagtggacgaaagaaaagccagatattgttacgagatactttatttgtaattttttaacaagtgttcatatccaagtaaaaccttgtttatccataaccttgattctctagctgtctactttatacttgagagttggtctctttaaacaccaacatttacatttaaaacattttatgaggtgatctttgcaaacactactgtaaggtcccctaacttcttttaaagacagtgctcaatttaatggacattttccttgaatataccaagttatcgtgaacataaatttttaccttgcgctggaatatggtggtaatcttggagcctgttaaaaaaatataaggccatttattattactcaaaatggccacaaattgccatacttaaaaatttttatctttattttttcttttatatcttggctggatttattaaactcatttttaaagtcattaatcagtatttagcaaacagctattatgtgcatagaattagagtgaaatccaaagacgaaaaaaatgacactttcattattttgagtaaacttgaactctttgtgattcctttgccacacaatcaccctgtgactacgtttatcttgctgcaaattttataagaagctgtccttcatagggtaggtggtgatggcagcttccattttatgtttctaccgtgtggcttggcagtagccatccttctacaagtattaaaatttttgcccttatgatatagggagctaatatacaataactgctttgtggattttcagtaactgggcagtgactggagtgatgggttcacaaagagacttatcaaaagtcgtgttttcggcatacacttttttaagaacacagagggctggggaaccacatccagaaaagaatagtttggtgaacacctacaaccactaaaaaaactcatggcacatgctgttctgatatatgttggaaacagcatgtcagtaggagaaagttgtcaattttcagagaagctgtagttgaaaaccagagtcaagacaaggcataaagccttgtcaaaatgtcactgtcttatgcaacagagagttatcattagattctaaaattatatagaaatatttgctactttttcctgtttaattgttctctatgaatgtctacaacatttaaaatcttaacttacatgagaaattataattttaattaccttctgtattccagaaagctttactctcttaaacttaaggcattgtagtaccaaatagaacattaatgtttttatgaagagaattgcttctcagaaatctccaattatcaattttaggattatctattttatttatttcatagccaacaaattaaatattcaaggcaattatctaaatatccaggtaaaagccttaatttgtagtagaagcacaggattttgataggcagaaattctttgattacctagtaactaatttgccttctaataaagacatttataaataaacacgtgactattatgcatcacatatttttcttggtgctagtaacacataaagtaataaaaatcaataataataactattattactactaatatttgttggaagagacatgtaaatatatagacagttataggctcatgggttaaaaagaaaatgtttaattactgttttgaaaaatgcacaaaacatatgggaaatactgtatgcatgcacatctcagtttcatttgtaaaatgggaattataatcactaccatgttatattcctcacagcagcttttcaaagaacaagaagatggtacccataaatacatttcagttgtttttcttaaactgccaccaaagcgatgacttcttctcagctgatgaatattaagcaagtccaagaagccagttaattggatacagattttcgaccctaaacctagtaatataagattaaaatgaaattcatgattaagataaaggtgtagcatctactatagactttaggaaactttcttgttacaaatgagaaaacaaaagcccagaaaaataaaacaaaatgacttgctcaagatcataaaattcatcagcagcaaagctaggactaatttagctttgttttagatactttctcaagccaaagttttctttctttctttctttcctttttaaccctcatgcacgcctctcatgtgaggtccatactatttagctcaactgtgtctttccaactttgctgctgtcatttagcagcttctaggagattcctcttctgaaaactcactctgctgttagtcttcctcttaatgtcagctcttaccttagttttggatgactccaacattcatgtgtttgtcccaccaatacctatcctcatagctcattgatctcagctctgtgttccttgccttctctttagcaacccacttaccctgaccacaatctggtaccctggccttgccaataactattttatttataaatttttaaacatgagaaagtcactgaaaaatagaagcctctccttttcttcaacttcttttgctcccacctcacctgctctccacatttctctggaaggtctgaataaagccattttctcagctgatctggtttcccttctgcatctgagcaactctacctccatatttgtgcttgttatcatcttgtaataaaagtcctttcgcagagaaaataaactttcaatgtagagtgactgctccacatgaagctctatttcaggagattatgaattaaccatttttttttctccagctccttcagggcagaaatgtaaaataagaccagaattaaacaccttgttaaaatgaaagaagaaaggatgccttctctatgagggttgtggttaacagtgggagatgacacatggtcagacatctctgtgacaccatctctaccacaagtaactagaagtggtatggagtggataaggatgagaaaattagagaagggtggctagagttgaaatccagagatctggaataggattgactcaagggattaatagaattaggcatgcttagagagctatcagggtgaagtatacagaaaacagtcccctaagtttattatacagataagatgcaacagtgctccatatagggctaggtagatgtaatagatgtaagatgtcattattgttgtcatgctattctaaccttaattaggaagatgcccttagcttagatgagcctgtgtgaagtaaatacagggaagttctgtggtggagatgtgaaaataaagagggaaaatgctgatttactaacactgagtggcgcatattcaacttctcattctctccctttataaaaattgcactcacagcatgtggccctcaatgcaaatcttttgattggacagcatattccacagctattgttaaacaatcagagacagtttcctctgttctctgtggtgctataacacattttataatttgtttgttataaaaggtagaacaaaaaaatcaataaacaaattgctgatagtatgttcaagagaaaaaaactttatgaaagattttaaaaggttatatcaggatattgaaatagtggaaacagcttataataaagaaattcaatatccttttttttcgataaataaatacattatttgttattttcaggttttggttaacaggtactactctactggcagagaagaagtcatgtccagattcctatctcaatttttatgttttgtagcacattctttggtttgaccaatgctatagtcattgaggagtagagatagtggaattatagtcttccttttaagaagttcaccacatggtgattactattcagttttgctaagtgcaaccataggagtaggcatgaggtagagagacaacagagagaactgtgattagctccctctggtccagggaagcagtgagggaaagctcatagaaggtccccagaaaaggtgacatctgaagttcactatatccgaggaaacaaaggagtaaattcagtaaaagcactgacatagaaagcaaaatatgctcagggacctctaagaatatcattaactctaaagtatatgtcctgggaaaatgagtggggaagaccaaactgaaaagagagaaagagcctaggtcatgatgggacatacttatcaagccaagaaaattagactcttggaaacatggtgagccagtgaagaattttatgcaggaagaaatcaagatcagattatattttggaaagggcatctggaaagctttggagaagacagattaagaaaaggagtcaaattggaaattaggagacaaatctgaaggccattgatggttgagggaagtggagaaggaaaggccagttcaattaattaattttgtcaagagatgattagagttttactaaagaaagtgtcaatggaaaaggatagaggagaatgaatttgactttctatgtagcagggaggttagtgtttagtgaatgattggttatgagaatcaaggaaaaagagaagtctagaataagccgcaggtctattttgtaggaataaatagggaataaagagaaatcgcagactgggaaaaaattagtttaggctgtttgagtttgtggtatccattggacaataaagtcaagggatcccataggccaccgatctggaaagagagttatatttgaaatttgtcagaaaatatctggttaaaaccatgaaaattgatgggattgccaagggggtaagatataaaacacaaaaagatggtcaagggcagtactttaaggcatgtgaaatgagaaagagtctacagaaaagggaaaaaggacagtttaaaaagtagaaaaagaaacaggaagaacctcatgttatgaaagccaatggaggagacagttttgataatagaacagtgacaaagaaagctgatgggtaaaagaggaagaactatagaaacagtgttctgtactagtagcgatacatgagactgtgtaatttatatgccacaacaacagtgttagaatgttctgaatttttatacttttacctgtgaattttatgccttcggatgatgttcttattgcatgttagtgtccttttctttcagattgaagaactccctttagcatttcttctaagaaaggtctgggggtgatgaattccctcagtttttgtttgcctgggaaagtatttatctcttttttatgtttgaaagttagctttgctgggtacagtattctcagttgacaatttcttttcttcagtgctttgtcatcctgctccctcctggcctgtggtttccactaagaagtctgttgccaaacaaattggagctcatatatgttgttttcctttctcttgctccttttgggattatcaacttttgaaagtttcattattatatgccttggggtagtcttatttgggtgaaatctgtgtggtgttctctacccttcttgtacctagagatttatattttctctagggttggggagttttcttgtattatttctttatgtgatctttctaccacttgccctttctcaactccttcttgaaggccaatgactcttagatttgcctttttgaggctattttctggatttcagaggcattctttattccttttctttttttttcttttttctcctctgaatgtattttcaaataacctgtcttcaagctcataaattctttcctctgcttcatcagttctgctgttttaaccctctgatgcattttttttgattcaactaaagtatttctcactccaaaatttctgtttaactttgtaaattaattatttcaatctctttgttaaatttctctgataactttataaattgcttttatgtgttatcttggagttcactgagtttctttagaattcttatttcggattattgacctgagagctcacatattgccatctcattggagtcagccactgctccttgctttacccatttgggaaggttatggctccctgtttgctggtgttttttatgaatggatatctgtgtcttattgaaaggttagttatttatcccagtcttcattccctgtgttggtgtggtctgtctagtgatgtgtatttacaggttctatgctggttgcctgttgagtccccttagccctagacagctgcctttattttggcactagatggtgccctaggcccaggtttcccacagctctcacacaagttggaagcactgcccattctggattggggagaggggtctccaagagaatttctctgctgtttgggaggctgactaggagtttatgcccagaagactcatgaatgtgcctcctacaatgtggtgctgctgaacctcctctctgactcggtatctcctttgtcttctgctcacaatttttcacttctctgtggcttcaaggatcttcacagcctcagcttcgaattctgggttattggtgatgataatcttgacactagatagttgtttttggttttctgtgaggaagatggaaggcatatttcttctactccaccattttggtgatgtcatacccatagacggagtagcttataaataatagaaatttattctctcacagttttggagaaactggcatgtccaagatcaaggcaccacaagtttggtgtctggtgagggctgctgtctgcttccaagatggtgtcttgttactgcatcctccagagaaatgaactctgtgtcttcatggtggaaggaacaaaagggcaaaggaggcttaagctagttctctccagttgttttagaaggcactaatccatttttgagtgcagggccctcaatgactcaatcaaattcaaaagtctctatcttttaataccaccacaatggggattaaatttcaacacatggattttgggggacgttcagaccatagcaagtagcctccacttcctcctagctctgtctttccagtagtgtgtcagtttataaatcaattggaagggcagaagccaggaggaagtggaggctgctaatatgcatccttgttcctgagaaagggagatgagagatccaatgataactacagagagatgtacttctaagtaaaataatcctttaggaggggaaaaaattaagcagttttaaaggctgatgaaaaagagtgagtagaaaaggaaaatttgaagataattgatcaagcaaggttgctgaggagccacgacaaagctgtggcagggctagccttgaacagaagccttttctctgcgtggtgatgtagtgaagttcgggaaagaggagaaaagagtatttgaaaacaacatttggtagcctttattttctgaattattcaatgagggaaatggaaagagagaagaaacaggtcaaatacaaatagagcatatttttagaggagccaattgagatgagaaaccacatattcctagtagtgttagttcatactattttgacattctcttcactattgtacagccctcagttacaagcaagaagtctcagctttcatagcagttaattaacttggccacctactggcccaatgtccaaaaacaccaaaatctttctttaatttactacaaaggctactaggtgcccatcagagatcagagccaagaattatcctttatccagatcctctcaaagggccagataagagaactgatatttaacagtgtcatctgggagatcattaccaacctctctgtatgaaaataggtttccaggggccacccacagtggctcatgcatataatagcagcactttggaaagctaaggtgggaggcttgaggctaggaatttgaggccagcctgagcaatatagcaagaccccatctctaaaaaaaaaattaaaaaataaccgtgcatggtggcgtgcacctgtaggaggcacctgtaggtggaggctaaggaaagaggattacttgagcccaagagtttgaggttgcagtgagcaatgatgcattccattgtgtttcagcctggccaacagagtgagaccttgtctaaaaaaaattaggtttccagaatattacatacttgactttgtttagtcttcctgaagaattgccttttctaagtaacatgttaatattttactttttcatttcttaaaggtcagaacagggattaaaaatttagacaatgcttatcattttcatctattttttgttgaagatattgcctgtgctgcttaatgcaacttgtataaattcatcagaaacatattatttttagatttaaatgttatgatagtatttgtttctcttaaagagctaacatgtttcatcttaattggtaatgagaacattgcattttctgtttatctcttgcctaccaggaagctcaaaactaaaattaatgctcaatcacagaatatattctagcttatgtgcatagatactagcttcttccaccttacttcaatggcattaatttatacttttttataattgtaaaatatctcaactctatttttggaaagagtcaggtgatatatatatatatatatatatatatataaagggaagtgacctcctcgtaggtgtatatctcaaccagaatttctgtatgctatgaagcagatggtaatgacaggtggaaagtttttttttaaactgtggaaactggaggtatcttacactcatagtttaatacgctaaagatgagaagatctagtgtgtacagaagaatccttgagtgttgatcacataacagaagagaatcatactttttcagattatttgaaattcctttcttggctcagatgctcacctgttcctgccatttccttcttagtgcattctgggacctgccatgaggctgtgtttggacattttgtccctttttgacagggcatatgtgtggctgaaacattctgtctttcttccatgttcaacctcgatatgggtgcctctgtggatttataacagtctcccttcctgttttccccttttctcatgtttataataaaaataaataaaatctgggaaaggcgagtctgtttgtaaagtgactgctcagtgagaaatggagaggaagcttgcttttacccatcttctaacttctcctggtgttctcatgcacttccctggccataattacttgtagtctggcagccagttttgttgaatgttctaggtaggctcagtacctatgatgctgtcttctacttcattcttgtttgccttaagggcaacatgatgtaacttgggaaaccgagcttgatataggatgagaaaatggaagacaccctatgtctcttaaacctgttaataaggtggtgattcaatcacagagaatagagggaggtactgtgtgttgatacatgtgagggataaattaatctttggctagaagcaccaaatttgaaaccatgaaaaggcaaattcatttttttggtctatgtcagtacatgctaaaggaaagtttagtatgaaatatctttgatatgccattttaaaagtaaaatcttacttgaaaagaaactgcctcttaaaaatgaaaaaaaatcgagtgagtgattaattttttgaagtgcttatattctgccttttacaaggttattttaggctctccttggtacagaggaatgcagtcaaggagtcttaaaccttattgttcatacaaatcacctggggagcttcaattacagattctgacttagtagatctggggtgggcctgagcgtctgtctctacaggctctcaggtggtattgatgctgctgatttctggaccgcaatatggacagaacctctggaagccccttctcataatttacttcttatgacagtgtattgtagatgctttcccatacatttatgaattatttcctgcaaaatcgtttatatatgtttaagagaaatgttgtttgattctcacataggcagaaaatggattttaaaatgtgcaaatttaaaaaattatagaaaagatatttatctattcatttcttacatttaatgattttaaaaatatgcattagctaacctgaataattactgaatgtagcattgtagttaatcaaatttctggttacatcaatgccttctcccgctagaatactttgcccccaaaaagtatctgtcctggtggaatataaactgctggaaagtaagatcttagttttgtttcattcactgatattttttcagcaattaaagtagggattcggacactgtagacacttggtacacatttgttcaattgaattaagtatggaaggcttttgtttcaaatgccttttctgccttagtaaggggtttgatgatttaagagcttacagggcttcacatcaattcttagtgcctagtactgtaaatgtaaatgtaaatgaaacaagatgatcgattatttattcaacttccaagaaccagcaacattagaagtctttggtttttactaaatttgttgtagattatttttcttttgcttctttctcaccaaagtggaatacagcaaaaaaaaaaaaaaaaaaaaaaaaaaaatcaaattaattgcatgttttgtgggtagactctacttattatcactcttccctttttccctttttaatcattgaaggaaaaatcattacatttactggcaattaaagctcacagatgttatatttttctcaatcactctctttatatgaatactggtatctagtaccctctcttccttttacactttagcgcccgtgggcagcaagaggtgtactgagtaggaggacctggatttgatctcacgtcctctgagaacaacctccatgactctggacaagccaggaaactgctttaagtccatctgtcttctcatctgtaaagagtctgtcttgcctttgcctttcttacacgcttcctgtgagacccaaatagttgatgtggaagtactttggaaactgtatacttttatatacatacaattagctgcattatattctactatagcttgtattgttattttctcatttttattattaataattcctcctagcctctacatttaccagaaagttataaacaaccactattactcagcatttatttaaaatgatagattatatgctaaaagagagtatctaagtccttgatttgaaaagaaagcttagatgtggggttacacacagctagttactacaagatgcatgatgcatgactatcattgtagcccagctttttctctctacagcctctgaaggatctcctgatcattgacattaatttcttcatatgctctgcctactgtctgattttcttccacccttactctttgtaggtgggcttgaagggtaaccctcatatttatatcagtaagccagcaagttagtcaatttattttataaaaactgctctactaattattaggcagtgcaccaggcatcagatattaaaaatgaatccaggtgtgcagaggccaataaagtttggtaacataagcaaatatatgtaaaaaattatccagatattttattacagtacagtaaaataatattttttatgtttccaaattttatgggtaccctgcagttcttaccattgtttttagtccagatggagggctagagaaaggattattgccacatcattgtgagagggtgtgaggtccaagggagggacaggttacttccagtagggatattgggtaggtatttgaaataagaggcattaaaactgggtcttacatgatagctagtgttacaaatgcagagctatatggaaaaataatctcacatcaataaaatcatgtaaatcagggatctgagtaaggtgctaacaggtatgcagagaatggtgagtggtttaattcatctggagcagaaggtagttacaggagagttgtggagctggttggaaaagcggacccagatgtcagagtgctgagaatgtcagagtttgaatttgtcttccatctgctatgttagtcaaaatagagtagaccctcttttgcaaatttctaccaaagactgataaatagggatttatttttaacatttcctgcccactcatttttcgggttcttttttcctccttgtagcatttgtgttagaaagcgacacctttgcaaggaagccaccttctttgtttgtctagaaaaacatcattaatcatacagtccatttacatttccagagcaacataaatatttgattttaagaaggatacaggcaaacttattgcaatgttttgcagctagagttgcagcctctgtggacatgtggcccgcctctcagtgaagcaaaaggcatatcacaagctggtttctcagctgtgaaatgccactacttaggtcacatgcctcaggaaaaaaaaaaaaaaaacctgccaggagcaacgccttcttcttggcagagaggcatgccacctgtcacccaaagctgctgtcccctctagcatcatgcacagataactttgcttcacttctgcatgtggggaagttgtgttctctgccttttgcagtgtatttctccatggcatttatctagtggagaatttagtttgaaacttattgaattggggtttattgcccatacttattggacaaatcttaatccagaagaatggttataacctagaatgacactgggtgaaaatttgaattgtgtttcacatgaaagatggcatataacaggcatatttccacctgacacctagctatgatgccacccttggtgacagagcaagatcactccttatgtcactccttaatagcatgcatgggttcctggaaatcagccttagtgaacacattctggatccttagaaccatgcctcatcaactcttaaggcatagaaaacaaggaacataattcacatattcacaagcaggtaaagcactccatacagcgtgtaccatattttagatttcctccatatctttgtaaggtctgatatggggttaagcacaaagtgcttaattaatatttgttgaatgaataagcaaatattgttttgttaagaggcaatctaatagacatttgggctggccagggtattggaattccttggcttcatgtttctctaggaaggacctatgtaaaacctcactgggacttacttttaggaagagatgcatgttcttactgccataataatgccatcttggcacaagtgtaatacttaagagttaaagcattttcctttgcgtttttgagtgattccaaaacatatgccattaaaaccattaaaacatatgctttttcaaaacatttcaaatataattcttatttttgccctctgtttttgttatgggttaattgtgtcccaccacaccccccaaaaaagttggaaccctaatacctgatatctcataatatgagcttatttgaaaatacgagctttacaaaggtgatttaaatggtaaagttaaaatgatatcattagggtgggccccaatccaacatgattagtgaccttataaaaagaagaaatttggatacaaaaaaagacacgcacacaggaagaacacaatttgaagatgaagacggagattggggtgatgcatctgcaagccagggaatgccaaagattgtcagcaaccaccaaaagctaggagaaggcatgggacagactctccctcacatttgtcagaaagaaccaattctatcgacaccttaatttcagatttttagcctctagaactgtgagagaataaatttttgttgtttaagccacccagtgtatgctactttgttacagcagccctagagaactaatacagttcttttgaggctattatattgtaaaacctgctctaggttttggtactttctgcatgtgctaaaaaaaaaactagtgttcacggtgcaactgatgctcatctttttatcgactattaattgcttaacttttaccctccccctaccatgtgaaccaccaccttctactcataaatggtaatataactcagaggtatgttattgtgatggctaattttaggtgtcagcttgacttgattaagggacacccggatagctggtaaagcatcatttttgagtaggtctatgagggtatttcccaagagattcacatttgaatcaatgggttgagcaaggaagagctgccctcaataatgaaataagctaaggacctatatagaactggagatgggaccccccttttctccttttcttacacgtcagtactccaggatttacgactttgaactccaggacttgcatcagtagctgcctagattcttaggcctttggccctgtactgagggttatgctatcatcagcttccctggttctcaggcctttggacttagactgagtcacatcactggcttccttggttctccagcttgtagacaagttactgtggaacttctcaacctccataattgcatgagccaattcccatatgaaacctcctttcatatctatctatctatctatctatctatctatctatctatctatctatctatcatctcatgttggttctgtccctctagagaatcttgactaacaaaattattattattaaaaaataacaacgatggcagtaccatggagtgagtatttattgtgtgccaaacactgtgcaattgttcaatgttcattgcttcatttggtcctctcgataaccctagaaggtaggtactattattattcttggaagtttaaaaatgatcatctaagtcatacaggtaaaaagtggcagacgcagggttcaaacccagtcagtctcattccaaaggcttagtgtctgattactacgtataatctcctgtataaggagacactaagattcaaaacaggcttatgagttttgagctagatattgtcagcatttttaatgtctaagtgagtaaggaaaatgtaaataaccggtgcaaagactgtattaccatgagtgagggcaaagtctttttaaaaaatcaggtcctggagctatattgcattcgacacacctgttcttgtcaaccagaaggacatagcccaactcattaccaattcagaaaaggataaaataaatgcacactgggtcttccttttctgttttcttcatgtgtgtctctctagaaaatgtgtgtctctctagaaaaggcagttctactctaaagcttgctcctgtttggctgcaagtaacagatagagggaggcattgtcagagggtaagagtagctacacactgatttgttttaaagcacacttgatccttgaaaaaccttcaaacacagtaactcctggaaatgatgataaaaagacatgccttcttttcttctgtatttagaacaattctataattaaaagaaacaaacatatccatatttctaaaaacaagggatatttttaagaggggggaggggaagaaaagctatatcttctctttggaaatttccagggcattagtaatgggagtttactgcattttgaaatttgacaatactcttagctgctcattctccaaagcagaatctacacactgccaattaattttccattgtagtgttagttcatgcagaagccagcctctcttacttagtccctagtgtgattacggcatatgcctatgagattcctgtttgtttgttcatttgcttttgtggaaggaattccggtattaggctcatttgattggaccaaataaagctgatgacctgtgaacctgtgatccagtgaggaggatacatagagtctatggtttcataacagagcgttgcaatcaacccttcctgggaaggtctaccagtgactttggcttaccaaaagagctactagccttttaaattttggttcctccatttgtagttatagttcaagcagacacataataaaaagtctgggtatgaaggagggggattagtggttaataaggagacttggactcagacacatctgctttcttaccctatcttagagccgtgtgactttaggtgagtcactgagactctctaaacctactcctcaaatctgcaaaccagagattataattgtacttacttctcatgcagctaacaagataatggctagcatataataagaactcaataaaatacataaacatacacacataagctaataaggtggtggtctgatattgtgtatcctacagtggttagcttctattggaagtgacttcccctccatctgtaaatatgatacagtgctcatcctaagtctttttcagagacctacactggagctagcacataatttactgataaaggggaaaagaggaagattcatatagagaatagactgagagcctcttaggcatctaactgctcccatcccttgactgctttgcatctggaaaatttgcagtgtttaatatgctcctgttaaaaggtaatgcctttggaaaatatagcacttaaagctatgatcagttatgacttcaagattttcagataagtggttagggggtcatgacagagtagtgcctgcagcggggagccagtccttcacaggccagttggaagacatcaaaggttattcctatttcataattgttagtggattttagctatgaacatatgtatagcatttcctgaagtttcctgagaatcatctttaatcatcatcactactgtttcccaagcacccttatataatcttcttggtttatataaactaatggcttctactctgtacaaggttgcgatttgaaaaggcactgggaagaaaataccagttgcaaagggtggtggaggctgaagtcatgtcaacaagatcataaggctgaaaccagatatttgtaatgctgcttgtaactttctcgagagtaggatatatcttatatctcttctgatttatatagcacttattacaactccttgtacataggctgaaaatgttagtttaaataaattgacattacaaagtaggatttttttaaattttaaatcagagttgtgaggctgtgaggaaaacatgttctttatttgtctgagggaaagaattagagattgggagcaatttctgtaaccaaactttcctcaatattatatttactttattacattccattttcttagtcatttatgggccataaattcagcctctctgttgtttataacttaagtttttattttttaatttttgtttagggcactggttgtcacttctggctgctcattacatttatctagggagctttaaaacctatagatgcccagccccagccgtggaggctctgctggagcctggaaatcagactcaggtgttcacagcccttcccatggggagaaggatggggagttagggagagaaaggggtaaagagtgtgtctagcattgcaaatgtatagggtgagtctgcctagtatcatctggtatcacctatcccatcccactcagccatgggtctccttgccatccttgagcacatgaaggatgtaccctcattaatgccttggtgttggctgtttcctccagctgaaatccactttcttcagctatttttgtggctggctgcttcttttcatttagatcttaattcaaatatcatttcctcaggaatcccttctctatataaagtataacccttcccctttcactttctatcctgttgctttgttgtgtttactttgtgccatttcctactattggaaattatctcatttatgcaattctttacatatttgttgttatactcacctactaacaggacaccgtcatatttccagaacctagaacaatgcctgatgccccaaaagcttgaagtatacatttttgaaataaaaaaaccccggggttttatgtttataacaggaaagacaaatatgtgactagacattgctaattgacctacggtaccctttctcccagattctgtaacatagttctcagcaccattctcagttatccatcattagccttcagatggaaacttcttttatacccctggtttaaaaagtaattttttgtacctagcttatttcatttaggaaattaaggctcaaataggtttagcaaattttatttttttattctttcttttaaatcattcacttcacaatacttattgagaatttagaatacaagaagcaatattttgtacaaggttttgcccaacatgtctccagaactttgattttgtgctatgcttggtcataatatatttttcaatatatatttgcagaatttaattcaatagagagcttaaaactgatttaaattactttatgtaaggcatatatgacaaatgtaggtgggatgattataatgtagattataggatcgacttagaggctgaagggatttcagattatctattccaggaacctcattttgcagatgaggaagttaaaaaccgagatataatagtttgtttttcatgcatgcttgaaggatgaataaaggactgatggactgaatcctgctgaacgttatgtgagtttttttgtggcacagcagatctctgaacccagttcttggtccagggctctttcatccccacctgtgatccccaaatgcatgcaattagaaacatctggggatattgcaaaacatgctgggaatggtgttctgggactcatatttttataatccccttcctccttaggtaattctgctgcacagccaaatttgggaccactatgtacgtgatattattagtatatgaatgtgcctcagttttaactgaagagataaggaggttccatataatgtatggagaataccatttgtaggactttcaaagaaaccctctactttttgcttagctacacagtaccagtctgagctaaatctcaataaactaaagacttgcttctgacatttaattaaatccaacagttattgactatgagagataaaaaatgaataagatatacttcttaatatagattatttaaatcctgcttaaatagaggacaataaattacagaaccttgatattcccctgaattttagatactcatgatttgttgggctgtcagcaatgtgtcttataccttgcaaggtgcacagggatgtttgatttgttctgatttactctcacatgaaagtatcagctttttcacttaaactgtcatggaattatctaccagtactcaaagtactctttcattatttacattctctggatgattggaagaagaaatggaaaacaagcatcatatattttctctcccatattttcagattgagcagtgatatatttcattatataaaatataataattataaaacagatttaatttttctatggaggtagcaagctgtttccatagcaagctctgcttttcctgaccagctttccctttctgtaccttatattttatccaaaattatctgtcagcagtaaaatattctatccatagacaattctctatatgctcttcacagaatgttcagcctaacatagtttatgtcagggggcatagacattcatttctcacatttatggagaggagaaagggaaagaaacattttagacggttgttagactccaacagccattgggagatccaatgtacactgggtgcaatatatatttttatatttgttttttaatgctctaccagaaatgttttatagaaagaataggacaaagattcaactgacagaacaacatatgtgtgtataatttttccccagaggaaaaaactagggattttaaggagagggaagtctgtgtcattgttagtgtcagcgacagttgtctctcttatctgctatggcagggaagatgcaggggtgggtgtggagggcaagtgatgggtgcgggtaataattgggggtggaggggagctgagtgctggatgagtgaggagataggaatggggcgatttgccttgggttcacgctaagcttccaataaatgtaggaatctgcatttcttgttcatactgtgttacgggcaattaatacagcacctggcacatatgagctatttttttaaaacatgttgaataaatgtatacttgaaaatgtatgttgaatatctgcttacagaattatgccatactttttgggaaaaattaaggttaataaataggatgagtggtatttagatgtgtgtattgcttctagcataatattatggatacaactggcacataaggaagttctgtggcccaacctctagcatggatgttgagttaagtcttacatattttaatattttaaatacatttgaaataactaaccacacctttttttaatttttaggaaagcgtgctcttattttcattttccattaaacaatttttcctgagaatgagaaatttcatccaaaatcaaagttattccaaaatcatgactttcaattcctaacatgtcgtgttaactttattattctttcttttatagatatcaactcttggattgaaattttaaatgcaaattcaatgagtctttcactgagtggtatgtgtttgtgtttgtgggaacagaattgaagggctggggaggtgtgcttcttttctgacagcacgtaggcagcatgtagagcaataaataatttccctcggcagctgtaaagttgggtaatatgtggttttacatttataaatcaaatggaatataaatgattgccaactaaaatgaaaacataactgtaatgaaataacttgaggaaatggaagctggattgccagtagggaaagaaatgtgtatttactttatttagtgaattttaatgaattgtatttatacacatatgcttattaaataaaaagtcaaaacaattgaatttactcaattactaaattgatttgaagggaagcagttagagactaatcagtgagaagaaccctccaactgattcattggttagttaacatatttactgtttacatgaattcagtctcacttaaaaccatacaaagaatgctttcaaaaatagccagattagaactcatatttctcatcttggtggcataatgggaaagttgacatgtttggaatgcagtatctttctatataattagctattttaaaaagtttatttttctaaaactatctcacacaggacaatctggacacagagaccacaggttctgacatttacagggacacacaggtgaggctacaagggtaactgtgcaagaacctgagtgagtgggaactggcaccctctccagccaactgtggtcatgggagaaggtagacctgctgttgccaggtctcttatttaaagaaaaaaatagaaatcagaaattgtatgtgaaacgtccctgtctttacattgcagcaactaattaattttttgaaacaccatatagacccaacaaagcctaactgtgcccaagctgctagtttgagagcactgccttagatagtcaagtgtagtggcaagaatacaaccattagaactggacttcctgggttctaactaagcaagaatttaatgtcgaaccttcggcatgtcacgcttttactcagggccttctcatttttaaaattagggatttgtgccaagtgatatgtaattgagtagcttttaaactttcgcaacatctgtgctttcacaaggaacagtaactgatcttcagtcattaacattttcgttttcactgtgaactatgcgatttctccaaatatttgaaatctgcctactattggcttctctgagagttgtttatgaacatttgttgaaactgaccagagaaaatactgtcaacttgtctctgagtctaagcaaattgttagcagagtttcagtacttggctatctcctgctgtagtaaacatattaataagctctcaccagaagaactgtgaacagatgcagttcttgaaaacacagtgtccttgtcacatttacttgtctgtctctcctagtgagcaagccttgcttgtggtatcctagtaaatattctgttttttatgtcatagccagatcatagttcaattcagtacaaaaatcactgtaaccagtaactttgatacacagagcctaagtcataagggaagatacacaatgccatgtaatgagaagactttttatctttttcatcctgtcacacaatttcttgtattctgtgacacaattccttggagccagaaataagaatagtacattgcctttgtagccacttttcaatgtagaacttcagatgcttcaaatacgataaatgcctctacacaacatcttgtatcataaattgggaactatccccagtgtagcggaataacctaggcatcacacataagcacctctgtcttcactgataactagctgagtaaccttgaaaacggcacacctttttgaatttccattttatcttttataaagatgctacattaaaaaatgtgatagggtagttgagaggatcacaagaaagcaattagatatgaaagtgctttgcaaaaacatagagcactgtatatcagcgagataacataccaatcaatctcttaactcattcaaacataaggaatagaagtacaacttgaataaagcagcttgttgaatcctaaagaattgcataattctttgggatttggaattgacctccttgttctcttctaccattccttctttccccattttaaaccatgtcttatttctcaaccatttaattaatttgtgacactgagtatatggaatcaaactcagaatctcagagaaaaagatttgatatgttccctgaagaactctaaagaagattactttggtttgactttttaattttttttaagaaattttttattttcattgggttttggtgaacaaggagtatttggttacatgagtaaattatttagtggtgatatgtgagattttggtgcacccatcacccaagcagtatacactgaacccaatttgtagttttttggatttacttttttaaaagagttatatatttaatattcattttttccgtctctctggacttcttccagtttttccacattagtgttaaaattgaggacttcgggtgattgtaacatcacatacagaattatgtagataacgagctgtcatcttctttttgcgtattcttacatgataaacagtttcctaagtttctacctagtctcagtattcatgatttagagtggtggcatgatattctataactggctatacaggtgtacctcagagatgttttggattcagtcctagaccactgcaataaagcaaatattgcgataagtgagtcacacctattttttggttttcagtgtatattaaacttatgtttacactatactataattttttaagtgtgaaatagtattatgcctaaaagtgcataccttaattaaaaacagtttactgctaaaaaatgctaatgatcatctgagctttcagcaaattttaatcttttttggtggctgaggtcttgccttgatgttgatggctgctgactaatcagggtggttgttgctgaatgttggggtggctgtggcaatttcttaatataagacaacaataaagtttgccacatcaattgattcgtcttttcattaacgacttctctgtagcataccatgctgtttgatagcattttacccatattagaacttgtttcaaaattggagtcaatcctctcaaccctgctgctgccttgtcaactaagtttatgtaatggtctcaatcatttgttgtcatttcacagcatcttcaccaggagcagattttgtcttaagattccattttcttagttcatccagaagaagtaactcttcatctgttcaagctttttcatgaaattgtattaattcaatcacatcttcagcctccacttctaattctagttcttttattgtttccaacacatccgcagtgactttctccattgaagtcttaaacctctcaaagaccttcatgaagggtggaatcaacttcttacaaactcttaataatgttgatattttgaattttgatcttctttagtgaatcccaaatattcttaatggcatctggaatggtgaatcactttcatacggttttcaatttactttgcccagatccatcagaggaatcaccatctatggcagctatagcttcatgaaatgcatttcttaaataagacttgaaagtcaaaattactctttgatccatgggctgcagaacagatgttgtattagcagccatgaaaacaacattaatcttcctgtacgtctccctcagaactcttgggtgaccaggtgtattgtcaatgagcagtaatattttgaaaggaatcttctcttttctgagcagtagatctcaacagtgggctttaaatattcagtaaaccatgctataaacagaagtgccgtcattcaggctatattgctccatttataaagcacaggcaaagtagattaagcataacttttaaaggcctcagattttcaaaatgataaatgaacattggtttcaacttaaagtcaacagttgcattagcccctaacaaagaaatcagcctgtcctttgaagctttggagctagcatcgacttctcctttctagctttaaaagcccaaagctttatgtagtttgtctgcattcaaaatcacttgtttaaagtagtcactttcatcaattatcttatgtagatcttgataacttcctgcaacttgtacatcagcacttgcttcttcatcttgcactttgatgttatggatatagcttctttccttaaaaatggtttctttcctcaagaaccaaccccttctagcttcaaacttttctgcagaatctttcttacctctctaagccttcatagaattgaagagagttagagctctgctctggattaggcttggcttaagggaatgttgtgaatggtttgatccttccagatcactaaaactgtctccttaacagcaataaggctgtttcactttcttatcatttgtgtattcactgtggagtagcacttttaattcctttcagggactttttatttgcattcacaacttggctaactttttggtgaaaggggtctagcttttcacttatcttggctttcatcatggcttcttcaccaagcttaatcatttttaacttttgatttaagaggaagatgtgcaactcttcctttcacttgaacacttagaggcaattatataggtttctgtgtttttttttaatttttatttcaggctcaggtgtacatgtgtaggtttattatataggtaaatggcatgctgtgggaatttggcgtacagattatttcattgcccgggtaataaggatagtacccaacaggtagtcttttgatcctcaccctcctcccactctccaccctcaagtaggccctggtgtctgttgttcctttctttgtatccctgtgtactcaatgtctagctgccatttataaatgagaacatgtgacatttggttttctgttcctacattagctcacttaagataatggcctctagctccatctacattgctgcagaggacatgatcttgtttatttttatggctgtatagtattccatgatgtatatgtaacacattgtctttatccagtctatcactgatggacatataggttggttccatgtctttactattgtgaatagaactgtaataaacatatgcacatgggtgtctttatggtagaatgatttatattcatctgggtgtatactcagtaatggggcagctgggttgaatggtagctctgttttaagttctttaagaaatcactgtgctgctttccacagtgtctaaactaatttacattcccagcagtagtgtataagtgctcccttttcaccacaaccttgccagcatctgttattttttgactttttatagtagccattctgactgatgtgagatggtatctcattgtggttttgatttgcatttctctaatgatcagtgatgttgaccaattggcctaattgtactattattgtgtctcagtgaaaggaaaggcctgtggagagggagagagatgggggaatgccgaggcagtagagccatcagaaaacatacaacatttattgattaactttattgtcttatatgggcatggttcatggtgtcccaaaacaattacaatagtgacattcaggatcacttatcatagatcatcataagagatataataataatgaaaaagtctgaaatactgcaagaataacccaaatgtgacagagacacaaagtgagcacatactgttggaaaaatggcactcatagacttgttctatgcaggactgccacataccttcaatttgtaaaaatgcaatatctgtgtttgcacattgatttattgtgcatcacagatattgcattttgaatgcctgtactgaaatgccctttattaagccaaaattgacaaatgggacccaattaaactaaagagcttctgcacagcaaaagaaactatcataagagtaaacaggtgacctacagaatgggagaaaattcttgcaatctatatatctgagaaagggctaatatccggaatctacaaagaacttaaacaaatttacaagagaaaacaaacaaccccatcaaaaactgggtgaaggatatgaacaaacacttctcaaaaaaagacatttatgcagccaacaaacatgtgaaaaaaagctcatcatcactatgatgatgagtgatgagaaatcactatgatgatgagctttttttagaaatcgaaaacaatgagataccatctcatgccagttagaatggcgatcattaaaaagtcaggaaacagcaaatgctggagaggatgtggagaaataggaacacttttacattgttgatgggagtgtaaattagttcaatcattgtggaagacagtgtggtgattcctcgaggatctagaaccagaaatactatttgacccagcaatcccattactgggtatatatccaaaggattataagtcattttactataaagacacacacgcacgtatgtttattgcagcactgttcacaagagcagagttggaaccaacccaaatgtccatcagtgatagactggataaagcaaatgtggcacatatacaccagggaatactatgcagccacaaaaagggatgagttcatgtcctttgcggggacttggatgaagctggaaaccatcattctcagcaaactatcacaagaacagaaaaccaaacaatgcatgttctcactcataagtgggagatgaacaacgagaacacatgaacataaggaggggaacatcacacactagggcctgttggggggtagggggctaggggagggatagcattaggagaaatacctaatgtagatgatgggttgatgggtgcagcaaaccaccatggcacatgtatacctatgtaacaaacctgcacaatctgcacatgtgtctcagaacttaaagtataacaataaaataaaataaaataaaataaaataaaataaaataaaatgctgtttgttttaagaattcaggatgtttatagtttttggtttgtttttgtttttccttcaatttatccagtactgtgcatatatcttttaaattttgttttattttctcatcctttctaatctatttttgttctgtattcaggtttctccacttcatcatcaatttatttttctgtaatgcctattttgctagttttcttcctccagtgtgatttgtttttggtcgattactctgtttttcatttgtctacaatctgctcttattctggcctgccctcaaataatacctgcttgaaaacctcatttttgaacattaagtagatattttctaaatttattttatatttcttcaaaacactatttttgaggttctccctcacccttgccatgcctttacagagtttttcctttatttttgtgctataaatgttcttttatggatccttgcaggctattttttctttttccttcgcattcatctttgagtgaggctaagtccaatcggatgtgatagtccaaagcaaccaacagtcacctttgcttagacttttcttagagctaccattgtctgctcctctaagagcaacctcctctggcagatttgaggttggagagcaggctgatttcagcgcacccagcataggctccagtgcaaagtaccaccagagcagtgcctcaacaagttttagtttatcttcctggctgtgaatgaactaattagaattcaagttaacgggaaaattttttgaaatgggttaacagaactgtgattgctagttatgctgtttttaatcgagtctcatcaatttggtagtttgtagaaatgttgattagattcagcattgaagattattgaattgaatattcaattcaacattgatattgatgttgaagattattttatttgtgttaattgctttcaagacttactaagattttttctcaaatcagacattttcttggacatcttaataggcatttgggaagggagatttcttacttttattttcttgtttctgtaacttagtttctacataataaaaaaaaccagaatttcatttgtttgcttttctatgtcacattgtgatttttttttccttatttaattccgtatgcacagtgaaaacaggtcatttcttaaggctatagtttaggcttttgagcactgaagccattcatagactgcatgatattaatactatatattaatatcaacattatgaatccatatggtagctcttctgttgcatactgaagtcatgggcagtcacacatatcagaatcattgcaaatcctgtattaatggaataggagttcatgatatttaaatatattgcatactcaagtacagccaaattattatctatgctaattaagagatgcaaagtcacagaaatacaatgaaatctggaaactatgcattattttggattcatttgcattataacttttgactttcttcatatttagataactagaatctctcctaaacttacatgcaaattaacttggattttctgaaaatataccaattgcctaaattagcatgttagtttgcaacaaaaaaatagaaatccaggatatataattcgaggtagataattcttaaaatagataatccacaaatagttaagaattagcaagtcttctttatgaatctgtaaaaattcctggcgtgatgtgcatgtgtgtgcacatgtatatgtttatgtgtatcaaaagtataattaatgtaaggattgcagctgtgtattttccatagtgttaagttgaacaatagaactattacctggttttcatcttaatactttaagtctacttttatagttactttaacctaacttaaaattatttcataaataaatacattaaccaatatgaaatttaatactaaaccctgcaattctgtaccaatgttttagccatgctttctccattttcagaaaatattaaaacatatgacaacatttgtgtccaaatccatttggattattctttttgctaaaatatgataatgcttttcctgattatcagtatatagtatctgttctacttccttgatccactaatttttaatttctcacaaagaaatcaaaataaaaaacaaggggtcagatttgttctttttttttttcccccagctactggagaggttgaggcaggagaatcgcttgaacccgagaggtggagcttgcagtgagccgagatcgcgccactgcactccagcctgggtgacagagtgagactcagtctcaaaaaaaaaaaaaaaaattttgttctttttatatcttctctttttcttaatgaatatttgatgagcctaatagttacagaatttttttcgagattgagtcttatacttaacaaaccatcaatatcatcaatatctaaatactagatggcagtttgcacactgttttaccttattgaagataattgtcaaagttgctagataatcttcaaagccttgaatttttatattgatttacacttaaagtttttccttataaaacttttaatattaaaaaaatataatcactccctaagcctgtgtcatctttcagttatgaacccttccttgatctctaaacaactactttaaatgcaggagaaagccttcttaatgtgtaccctgtaaaaaacatattcaaaattttctttattattatgttctctatgaattcctggtgttgattttggaggaaaatgtaatggtcttgtgctggtgtaggttcaggctatgtgtgaaccacgttcagatctagctgtactcagtgtctcaaaaccacattaataggtagccctgcaaagtggtaatgagcagtttctgaacgcaggtggcctttggtccaaatcctgaccctgccacttaccagacaagttcttgaacttctctgtgcttccgtttctgaatctgtaaaatacagataataatcatacttatcttttagggtaattgactgacaagtacatgagataatacctggcacacagtatattgttacagagtttgccaccatgattactacccattcagtgcaagtgaggtaccctatataaactacatagcaaaacaggacatgtgatgctgggcctgagctgttcagccccgtaaacaaggatagaagcagggtagacccctcctgatccacgtggaatgagattttcaaagtaaaagaagggaattgtccagataggagaaggcggaaggaatgttgggtaagtacaagcaacagatgtccactccctatggggaaatgttgaaggaatcataaaggggaaaaagattgtattgtcattttcattagcagaagtactattttgcaaaagagatgttagtcatgctccatgtggttgtataagttcagaataggacatgcacataagacaggcaagaagtcagattcccatgactcaaaggaaaaaaaaaaacctgatcagaatttgaaattgaatgaactgtattgtaaggctgtgagatgcatgttgcttgagacggcttttatttcttattttttctttttcccttttccaacttttattttggaaccagggggtacatgtgcagatttcttacaaaggtacatgtgcatgatgctcagctttggagcacaaatgaatccgtcacctaggtaagagagtatattacccaacagacagttttttcaacccttgtcttcctccctccttcctctctcttgtattccccagtgtctattattcccatttttgtgactatgtatactcagattttagctcccatttataagtgagaacacatggtatttggttttctgtttctgcgttagttcatgtaggataattctttccagctacatccatgttgctacaaaggacaagatttttttaatggttgtatagtactccatgcactacattttctttatccaatccaccattgatgggtacctgagttgattccatgtctttgccattgtgaatactgctgcaatgaacatatggttgcatgtgtctttttggtcgaacagtttattttctttggggtagataccagtagtgggattgctgggttgaatggtagttgaactctcagttctttgagaaatctccaaattgctctctatggtgaatgaactaatttacattccaccaacagtgtaaatgtgctcccttttggaggaagtttttaagcagaggtctaaatcactccttagagaacaggttttacataataatagacagacaggcagagagagagagagagagagagagagagaacacagtaaatgcatagtaaatatgcctaaatctatgacttctacaaatgtgggacatttagggaaagagctcagatctttgagaacttgctctgttattaatggttgtatgatactcaatcttccaaatttctagtaaaaatgttaacatatttattcagttcttaacttttctaagctatagtctggatgtaattttatttttgtcttcacatttaaccacataagtataatccatgcttactagagagttcagaaacatagctaattctcaaaacccattttagttaatatttccaattgaactggtgagtttctgtattatacccctcactctggcattaatgaatttcgctgagagaacaatttgattgattaattgatctcacgttagcaaaataactaaatttgctcgtcagcaataagaaaggctgtattccttagagagtagcacatgaattagaaacttggttatttgtctattgcttatttatgtttccaatatgatatatgccttaaatctcctgtgaaggtaggcagtgtataaactaaatttatgttttattttagacacattccaaccactattattgtaaagtcttagacatatattttacttctgggtaattatttgacagtaatttagagagtcaattactaaacatataaatatccttctgaaatctttaaatttttttggaatggaataggacagttaaagaaattaactattatgcttatctaagtaggaaagagttaataaataaataaccaaacatgatccttagtaaagtaatttaaagtaatcttaaactattaaaatgatttcaaaatacctatctatcacaagttcattgttatacaaataaaagcctaagataaggactgggtttagatttttcttattttttaaaaaagccttcttacattcttaaaaaaacaaaacaaaacaacaaaataagtttccaaagataaagactttgaaagagaattcctcaagttattatgcaaataattctcaaaatgttgtgaaaatagtttcccaaacctgataagtttatattgtgacgtgataaaatgaaatataacttttagaattctcataatagagaaaataatctggctttatctttcttttcactgattttattttgatcagctctaatcacgtaatttcagggttttaggggaaaagttgtaatgcgctttgcattttaaaaggtcgcttatagcttacctacaaaacaactctgatatttggcaataattgttagaattcatggaatgtgtagattaaatatcattgaaccttcaaataatttttttttttttttgagacggagtcttgctctgtcgtccaggctggagtgcagtggcacgatctcagctcactctgcaagctccacctccggggttcacaccattctcctgcctcagcctcctgagtagctgggactacaggcgcccgccacctcgcctggctaattttttgtatttttagtagagacgggttttcaccctgttagccaggatggtcttgatctcctgacctcatgatccgcccacctcggcctcccacagtgctgggattacaggcatgagccaccgcgcccggcctcaaataattttttaaaagactttgtcattgtgttaaattatgtctttgcatccacaattttaactttattcccccattctcctgagggtaaaactaaaatctgtccacaagatagagagagaagaccaaggaatgtggcaagtcatgaggaggctccttaaatttcaggccagagctaatctacagaatgaataatcaggtaattgttaaatgatttgtcttggaaaataataattgctacaaacctatggtacagcccatccagttgagagtaatattagaaaagcctcatttatttcatgaatcagaataaaggcaaaaaattggcttgaatgtcttgaggacaattaaaaagtagctaaatgctactttgtgattttaattacttatctgaacaaaataaaatttttacgtaatagcacctcctcatttaaaaagctacctacttaatccaacaatccttgaacatcaattgatacatatttaaaaaatcatactttgaaaatgtaagccacatttccttttaaatttttaatatgaaatttatgtttcagattggctatgtgaatttttctgcttcttgatctatgtgtttgttatgaagcttctaaattcctaaatatctgaactgttaaacttatgatcttttgatgtcagtggtccccaaacatcaaatcacattttgacttttgaaatatagagattatcagacttctttgtggacctattgaaggagaatatctaggagttgagtcccagcattctattgctttttatgtttccttgtgactgtgatcacttatatttgggagaccttgatcctgtacaacactgagcatctctgaacttactggttattttgaacattttattcaatatctttcatcagtttgtaagcttctgaatggcaatgctcatattacattacattacattacattatgactgagtttcaaaaaatcttctaaagtaacttttatatgttaaatattttaaaaacttatgaccatctctagattgtgttatgagtaataggaatatgaaatcttttaaaaatatacagataaggttttgatatgtttgaaatgtcttttattttatttgtaattgttaacatattattctgactccctggaggccagttttcagctgtagttggtacccgatccataaaattcttttcaaaaagtccatgagttaagtactcttggctgtgtttaaataacactgtcaattccaagttgaatttaaaatatgccacaacattttcatatgatgaaagattcctaacattagcttaagaaagttatgaaaactactggaaagccaatgaagcaatctatgttgtgccttttttgtactaccaccactatcatcaccactatttctatgaccactattttttactatatgctaaatgctgtgcaagttgttttaaatatacaaactcattttatcttcataacgactccactcaggaggaagaaattgagcattagatagtttcagtagcttagccaaggtcattcagctataagatggaggagatgggatttaactaaatctccacacctttatctcccataataaataccccaaaagtctaataaaaatgtttatctgttatgtgccaatttctgtgtttggctttggagaaaccaaaataaatagaacctggttgctgcccttgggaagcataaatctcagaaaagtttctgaaaacacttctttatctttcctccagtgctcttaaagtcatttttttttctctaacaagtttattgctcagtggtggtcaccaactccatttttttaatgttatttaaaaatatccaagaaagctgtcatacagctgaaagtatgcagaatataagtgagagaattacattaggaaaaaaactgggcacattttgagcactcaatacgcatgattttattgaatacttaggacagtcttatggtatgcgctttatataagatttatgaaggggaaaaatgagactcctagaggttaagagatatgaccagacttgtaagcagagatgctgggatttcagtcttatctagtgatatccaaagcttttgcatttccaattggatcacggcatctcccacgtagttttggtacctgatttctagtctgggagaaggttccctatggaacctgaggtttatagagcagcaaattttcctactataccaggtagattagtagaatctatgttaaaataggttcactgtacaaatatataaaattaagaggtagcaaaaccagacttaaatacatttggttagaaatccttccagtaaggagtgtttcttaacctattttgtcaatttttggcagcagaatcatgaccttactagtcattcaggaatccacttgaattatcaggaaagacttcttagcttgggactttacaataaaaatattagttgaaaatggctaaacccacaccctgtaataaccattaacacttcactgaaacacaataacttgtagtaattaaagtactacaaggcagtacctattagcagtataaactgctaattttaattcactaagaaactatcgaaataattagcctatggggcttgggaatcacttgctttttgtgtatctggatttctcttccaaatttgcgagtcattctgtttgatcatgctgttcttgtctcatcttggtctgcttctttgcatcaagtttattattacattgacaggaatttcttgggttttgtccacgtgattattattcaaaggtcacttaagtatagtctttgtctcttctctttaaaaggaaaccttctaagatactttctgttaggcagcttccgtctagttctctttgctatagtgcactagcactagcactgtgctgggttgctacccgcggcctgcatattcttttctgtggtagaaggaagagattttactctgcttattttctggtagaagaagaaattccagatagaaatctaagctagaaatggatctcctgttatcaagaaccatggatgcattatcaacttcatgcttaatatagttatatatcttcacttacttaggcagttttactctttaatcatatttctcctaaaatcatgtaggcttgaaaggcaagactttttggaagagcatggtttctttagaaagcatgaagcattactaaaatctgttactttttagttgtctcatcctgggtctctgagatggagattagcctgcaggaaacttaataggaatgtttttgagatccacacttattagggatgggaaggaagggagacaggataaggtaggggactgtgatacagtcatgataaaaccttgaccaacccaatagcaagctctgaaactgaaatactgtacccatcagagctgtatttggttagggcaaggagctgggcctttaatcctgtgtgtttaccagtcattcaatggaggctgctactgaagttagtatgaccttggctgaggcaactttttcaatggagggaattctggaaacaaattaacagctgagagctgtcccagtagctggggaataaatccctcagtgctaaagacaggatcttggcagcacaatgcagcattcgtgacactagtgtttcatgaagaggaaataatgacatagattaggccaatctgtctcaaccatttcaaatcattctttttgataaacataaagcattattttgatagacctccctgaggaagcagtggtgttgctctggttgataatctgcattctttgtatctatccgctggacaagaatacaccctgagccctggtatacattaagagatacttcttttcctttgctttccttctctcttaattgacctgctcagatacttccattagggcatctgagctgtaacatttcctaatacttttctgcaaaatgaccaagataatatctgtacagtgatgttgtgatacccctccctcctttcatgcattattctataatatcctgcactaaatgctcacagaagatcaagtgattgatgtataaagaagaaccaatggataaaactttttactttcaaaagtttttagcaagattccacatcaaaagcaaagtatataaataaacaaaacttaaatgttattgtcctgaatagagtactaattctttttttactgtatatatttaaggtgtatgacataatttgaccatatttgtgaggtcaaatggcatatatagctattagatatagattatataggaatatacgttgaaatatggggattattaatttatgccagatagaggaaggaagagattgtgtgggtgaaagaattaattataaagcaaaagacaataaactgctaaggtttcaaaggaaaaattggtgataaaagcagaaactgtctataaatttctgaagacgcttgatatattctccagcaaacattcattaagttttcttgatgcgctgtgctatatgctaggtgcctgggatatgaagattaataagaaatgggacttgctgccaaccaaattactatttagtggtaatacacagggaagatgtgcacaggggtctcagtggccacctgaatatgtatactcagatgcttacactcttaggtaacgctcctcaaactttcccagcttctactctatctttttttggggggagatgatgatgattataggttagttaattatctataaaggaaattgaatattatgtaataattataataacatatctcagggtgtgcttattgggacgggatatgtattactctgattgcagagactagggagaaatgatggatctgtagggaagaagataaactcatcagcatgccaaaccctacggtagtttgttgtctttgttggctagaagggggctgaggcttaagaagtcaaaacattttcaatgtgggttagaacacacatagttaaagcatactttcttgtaaaaggagaggattggactttaaagtaaggcatggtgtagtaaaatgtggatctgagataagagtcaaaagactctaccacttgtttgctatgcaaatggccaacttgttaaactttacttttcatttgtattttggtactaatatttggcctatttatataagaagaccaaaggacacaaccatatacaaatataattttaaaacttttaagtataatgaaaatgcaataaattataaaattatagattataacccaccaagtgtcatcaaaatccaagtggtattgtagagtgttgtctgcaaaactggtaatgatgggggaaatatgacaaaaaactttacaagtattataagtgataattaaaatggccacaagaatattaggcattatttggaaaggcacagggaaaaatagctacaactgagcaaaaccttgtgtatctgtatctggaatgatgaaattctggaattgcattgtgaggaaaaaataaacgtgtggatcacaaaagtaactggccacgaatgtaatcaggtaaacgtagagatgtccatatgtggagaaaaaagagatattgacactatttagaaatattgatcctaaatagtctcaaaaaatggtagttaacataatgtatgaattcaagtctataaaaatcaccaagattaaggatcatgtgaatgttttatcagtacaggagtactggatttgtggaacagctatcccttgatttctgaaagagataccgagataaaaagacctgcttaacataggaggtcattatcctgggggaaacaatgtaccaaatgttgatggatgagagatatcaagaccagattgcctcacatttcttctcctcctccctagcatggggttggagtggtgtgggcaagattgtgcagccttcatctcgaaaaggttgcagggtgtacatttctgtgattttgcctggttgtttcctagtcacctgcttttccacaggaggagtttaagaagagtaataaggatgatgatgtgtgacttccgtgctcccttgcctctcagtcctcaggcatcccccatgcctgagaactcacagggttattgagattccctcaaattcagagtcacgaatctgtgcctacattagaccccacccagagacctggaagtcttttcgtctcagaatggatttgtcagtcgtgggatattttgtgagcatttctcctgtgcccaggattgcagtcacctttggcttgggtagccacttcctggcaggtttctttattaataaattgttgtttgcttatagaagttagtctcaaatgaatattgcccaacaagccttattcttaaatttctttggccccttttgcttttggctgggattacttggactttttgtaacaacaatttttattgaatactagagagtcataaatccgacacaaatatcccacaggcaatgcttatttactttcacataacagtttaatgactttaaaccatggttctgtgacaagttagagaagtccaaaatacctgtgcaaattacatataatcaagggctgtggcagcttagtgaaataccgttatgctgccaaataagagcatttaattcatagaaattacaatttgcttttctatgcctattttacatctttttgccttttatcatttgaatgaggatcaattttccagagttcatatgctatgaaacaatgtaatcatatatcataaactgggtttctttgatctcagtgctctgttgcttcctgatagtgttccatcaaaaagaattagatatttgccctttgcaaataacaaggagatatttgatatactccataaaagaagatatattattaccttgattgacaaagcaaactcacagcacaattattgttagaaagcccagtgttacactctaaaataataaaaagcacaactgttccttatttatttaacaaattattaattgatcatctactatgtgtcagacactgtgctagctctgacagttcatcagtgaacaaaattgtttgtcctcagagagctgatattctcctggaaaaaggcaataaagtaatagataactaaattgtatgatattttgtatgctaaatgctgtgagactacagagcagggtgaggatgatggggagaactggagtggattacattttaagtaaaatggtgaagatagctgcaatgaggagatagaatctgcataaaggactgaaagtgagtgtattagtttcctagggttgccataacaaagtactacaaacagaataatttaaaataatagaaatggattgtctcacagttgtgtaggctagaagtctgaaataaaggtgtcagcagggccatgactcctctgaaacttgtaggagagaatccttccttttttcttcccagtttctggtggctcctggcactcattgacattccttggcttgtagctgcatcactgcaatctctgctccatctcttcacatgggcctctattttgtgtgtgtctctgaatgtccactcctctttttataaggacagcagtcatattggtctactctagtgaccataatcttaacttgattaaatctacagagaccctatgtctaaataaggtcacattcataagtactgggaattaggacttcaacatatctttgttgaagatcaaacaattgtgtccctgtgggggacaaagttcaatctataactatgagataattagcaatgcaggtatttgtgtttggggtccagggaccagtacaaaggagctgaagagggtgcatgactggtgtgtttgaaaaacttcagggagctcatttatcttgcatagggttagtgatgagtcgaatagacggcatgaagtctgagaagaaccaggagacagcctggtgagggacttgtaggccactagtgatcttggctttttaatgcaaagtggaatagggagctttagggatttgatttatgtcttaaatgcttcactctgtcagccgtgttgagaataaattacagaggtaaaggaagatgcagcgaatgtgattagaagcaatctgatcgcaatattccagtgaaggatgatgtgggcttgggtcagggtggtggcagtagaagtggtaaaaagttactggatggattctgggtagattttgaagatatagctcgaaggtttgctgattgtttggatgtaggtgtgagaagggagtcaagggtgaatccaaggattttgacatgagtaaccggaaggatggagttgcactgagtgatatgcagaagccagtggagcaagtttggaggcaggattagaagccccatttaggtcatgtaatgtacaagatgattggagtggagaggttggatggtcagttttgcataaacagttgaagttgaggtgagagatctgacagaagagctgcctcttgctagatagtatttgtgcaaattagcaccaggcagttcttcaggaccagtgactctctgggtcaaatacattaacccagcttctcctttgcctgaaagtcttcaggctgtgttatccctgcgtataccctccgtgggaactatatccaacaggctgcttctttcttcccttcttcacaggaagccaggtcctggctttttatccctctagtcagaatgaccttggacaaatctagagagggtaggtgtgtaaaggcagtggatgacagagactgatagtaggatatttcgttattttggaatttgaatgaaaaataataatttacttttctcattttcaattaaatttgttatggattttgtgattgaagctacagtatggagtgatggatacatattcaaaacaaaaatatttggggcctgattttccaatcactagacttgaagaccactgtgaattctggttcaaatacaaacatgagctatgtgtaccaccattgctaacgcacacacagacagatacatgcaacacctctattccttccaaattttatttggatggggcacttcctggtggtacaggatggttagctccaccttggtggtttcagtcagtggctgctttgttccagaggcacccttctgcactcctctccttacactgctttttctgaacttccctttcccatcttcaattcagcactcaggagacagacattttcctcaacacaaagacaaattatgaagcagagtggtgtggtagaacaagcactagctggactgagcatcacagatgtcaacagatttctgctgaactttggaaaggaaaaaaataatagccaattaccgactgattacaaatattggaaaattaattttttatctggatagtgaagggggaaaatcttacttagtgtttattaccaggcaattcagaataaatttccttatctttaaagattatttctaatttatctagctcattcatttccacaagtatttgctaaatgccctcatacaccaggccctggtatgggcatagaggtaattctctatttcactttggtggaaggacttggtctaagaggtcaagacagggcagaggcaactcaatgctggctctgctgcttcaggtgagccaggagggcagctaatgaagatggcagaaccagagtagatgtgaagctgagaaaaggaaggaaatgtagacagcccgataaaggtgcgccatattaaaatgagactcagttttgtttcagctcctttgacaaagcagatgttagcttagttgacacattcaacaaaatataagcaaaagaacactattggaaaaaaaagatttcctttgtcgctctgtgtgatgagaggagtaagcattgtcagcagaattttcatacgggctgggaatgtttcctagtgtttagtgtaacatcacattgacagcatcttcattattattcaggctgagatctgccggtgtgatggaagttgaaagacaggatttttgttgctaaattctttgcctgtgccatgtctgaactgccttccttatgtgttgtttttaatggcagtctgaaagacctcaagatgaataactcacttgaaatagcagctgtggaaatacattgttaagaaagaaagagaaaaagaaaaagattctggctgttcagcacaagtgctagctagaactggcatttggatatgtggggtccactgggcatgattgatagttaatatgctgggaaagaaatattaaagaagatgaaggagatgtatgtgttaccattccactggcataaaatgtggatatagaggttaagaaagactgattatcactagataatttataaatatatttggatacatatacttgggtaaaattgttctattattatttatagaatgttatacagtatttaaaatgaataatttcagcaggaacttaataaaacaatgcggtgggatcactttagtgattccaatcatgtagtttgttcttgtaattttacgatactgttagaacatagacaacggtgtgttctcctctctctgtaaataggctgtttctggccttccctttcccatccccaccatccccactgttgtaggaaaaaccaggttcttgtcacaccaccaggaaagatgaggctcgcagacactttgaagggtgggggagaatggagtttattgggcaaaaaggaaaaatctccacaaagtgggaggggttcctgttaacaggcccccatctcacagattgaatcccaggttagcacacaggaaccggaggggccaggctcctcctccctgctccctgcaaatctcatgaacttcctgaggcatcaccctgtcttcccagtgcacaggccagttggagatgatcaggggagccctttttacttggctgtctcaataccataatcattatcactgtggttgcccagaagcatttgttgcaatgcccgtgggctggacattaggttgagcagcatgcggtttcagaagtgatttttagtttaaaggcaacattccattcagcacctcggatgtgtgatatgtgagatccagctttgaggggataggtggggataagaaggccatctccattgagtgcaagagaggaaagggttaaagtaaaaagggggtactctgccaaagaagggaccccaaatttatcttctttattggagcagatggatggagaacagcttttgtgtttgtttttaagttgttgaaactttataagaaacacctccattagtaaaaatttattgtcctgtctcaattatcgaaaagatgatacttttctttaactctatgagagaaaactttggtacagatgagagtgtgtcgaacctccctcctcccattttgtatggtacctgggcatggagagcaagtactccaaggtattgaaatgtctttttcttcctaagcagtcaatgaaagagccttgtcttttcaatcacgagaatatagaacattagtggctcatgaaatgtcaaaaatgaaaaccagactgatgtttcataaagccaggcgttgtagaggaactatcagtggaattttcattttcattgcccgtgcaggcaaatccaccatatctctttaccactatggatgggttaagaggttgttaaaggtttaaaagatgcctggatttcattttgtattttgctctcatcctcttcagtgaaaatggggcttggaaggctttcagaattcttcactataggtttgccccagtgacaacccataattttaaagtgagcatgcactggcagattgtcaccaataaagtaggtaagtgtgagattttggtggccgaaggactcggagcatcttcaagaaattattagtcagaggcagctttataattttcattggggatggtgatttgactctgttactgtgtagaagaggctggtgtggagggtgatatagcaattaagtttacctaccatgttagaattgtgaatgtaagaattttatgtacactagcctatgggttgcataataatactttcaaatattactttcctcttttttcctcttctgaatatgctgtcttctgccttcactgcttcaatgaagggatgatactacaaaacacaaaaacagagaaatcaggtcttactttttgtgtttctaatgcctaggtcctggggagacaggatgtaaaaatacacgtgacacagggagagccagttcttcattcctcatactagaaaaggtccttaactgatgagagaagggaggaagttacaaggtaagcagaagagtaaaagatgttgagggttcctaagcaaggggcccctaccctagttccctggtcagagtctgtggtcctcaggtaattcaggggaatctgagagcagagaggatccaagcctcgttggtgtgggatggggttgggtgggaggacaagagcagtaaagggagtagaaaggggaggaaatgcacgtagcaagactaatttttttgtgtgttcccaactgtgggtcggaagcaataaagtagaagtggctgcacgtggtgtctgggcagacaaggcttagataatttcataattctctgtatcccccaaaggatggggacagcacatggctgtgcatgtgcccaaacatagccttacacattcctactgaatttcccacacccacggtggagtgggaacagctaaatgtttcccaagtgcccaagggggatgtgggaatggctcagagatggcaggtcctggagcagccttgttgctggcagtgaagcatgatggagtaacatccatgaatagatgacccaagtccaggaagaataaggtccgtctcagcaaagcatcatttaaaagctgtggagtctccaaagtacttggaaataaaagggcatcttgactgcaacttgctctaagtatgagagggtgtgggtgggagaatgaaaaagcaactgtgataaaatgttaacatttgggaaatatggggaagggtatacagaactttgtattttctgtaaatctgaaattatttcaaaataacaagttaagaagctacagagagaggccaaaaaataaaataaagcaatgtgtttagagcagactgggtcatgtttgagatctgcagaatatcatttattcaaaaagagcagccctgcagtactgaattagtaatagctaggggcccacctcttcacatctgaaaagagaaaaagaggaacggctcacagaagcttggggacatgtcacggcaagagtggaagcagagtgttaatttgttttaagctgaagttaatataaagtgaagtgaatggcttggagcagcccgtagtttgcagaaagatgagttttggaaaatcttgagcttttggtaagtaagtggcaaaatgtctgattttacctggaagcactttttcaaattaaatttaatgcctttctttattatttaattcatcgatgaattgtacattaagcagtgtataataggtgttgtgcgagctaggttgtagctatgaagattttccttcaagatgtctttgagtctctggagtggcaaacatatgaatccaatcatgaaataatagaatttaataataactatacaaagtttataagtaaaatactgtggcaacaaaataaaaattatttttattggagggacaagaaaggttttgtggagaagtgacattttagccagattttgaaggtcagtgggattttagcgagtagagacggggaagttaaagttagttcttaggaagaacatatgctgaaatgcaggcatcaagaaatgggtagatgggggcattcttcataatgctgctttgagactaggaaataggtaggtggagtggatctcaaatctagagacattaactcccttaaggaattctgtgattttttgttcggttggtttctttttttgagacagagccttacactgtcacccaggctggagtgtggtggtgcaacctcggctcactgcaacctccgcctcccgggttcaagcaattctcccatctcagcctcccatgtggctgggattacaggcacccaccaccatgctgaattaatttttgtatttttagtagagacagggtttcaccatattggtgaggctggtctcgaactcctgacctcagttgatccacctgcctcagcctcccaaaatgttgggattacaggcatgagccaccatgcctggcctgtggtttcgtctttttaaacatttatcttctttcctatctgggatttattttgatatctgttttgaagtaagaatcccatgtcattatctttaaccccttcctttctctacctcttcccatatccaatcaatcaccaagttctatcaaatccatctctaaatgtttctcaaatatttttattttccctatcctcatcctcacctgttcaagttgcaatcattttttaccgaattgctccaacagctagaactggcactcatatttcatcctcctctgatccataataaaaagtagtttttttctaattctgtgaagaatgtcaatggtagtttgatgggaatagcattgaatctatacattacttcgggcagtatggccattttcatgatactgattcttcctatccatgaggatgaaatgtttttccatttgtttgtatcctgtcttatttcattgagcagtggtttgtagttctccttgaagaagcccttcacatcccttgttagctgtattcctaggtcttttattctctttgtagcaattgtgaatgggagtccactcatgatttggctctctgcttgtgtattgttggtgtatacaaatgcttgtggtttttgcacattgattttgtatcctgagactttgctgaagttgcttatcagcttaaagagtttttgggctgagatgatggtgttttctaaatatagaatcatgttgtctgcagagacaatttgacttcctctcttcctatttgaataccctttatttctttctcttgcctgattgccctggccagaacttccaatactatgttgaataggagtggtgagagagagcatccttgtcttgtactggttttcaaagggaatgcttccagcttttgcccattcagtgtaatagtggctgtgggtttgtcataaataactctttttattttgtgatatgttccatcaatgcctagtttattgagagtttttaacatgaagggatgttgaatattattgaaggccttgtctgcgtctattgagataatcatgtggtttttgtcattggttctgtttatgtgatagattgtatttattgatttgtgcatgttgaaccagccttgcatcctagggatgaagccgacttgatcatggtggataagttttttgatgtgctgctggatttggtttgccagtattttattgagggtttttgcactgatgctcttcagggatattagtctgaaggtttccttttttgttgtgtctctgccaggttttggtatcaggatgatgctggcctcataaaatgagttagggaggagtccctccttttcaattgtttggaatagtttcagagggaatggtactagctccactttgtacctctggtggaattcagctgtgaatctgtctggtcccaggcttttcttggttagtaagttattaattactgcctcaatttcagaacttgttattggtctattctgggattcaacttcttcttggtttagtcttgggagggtgtatgtgtccaggaatttatccatttcttctagagtttctagtttatttgcatagagatgtttttagtattatctaatggtaatttgtatttctgtggggtcagtggtgatatcccctttttcattttttattgtgtctatttgattcttctctcttttcttctttattactctagctagcagtctatctattttgtcaattttttttcaaaaaaccagctcctggattcattgatttttttggagggtttttcgtgtctctatatccttcagttttgctctgatcttagttatgtcttgtcttctgctggcttttggatttgtttgctcttgcctctctagctcttttaattgtgatgttagggtgtcaatttgagatctttctagctttctgatgcgggcattgagtgccataaatttccctcttaacgctgctttagctgtgtcccagagattctggtatgttgtgtcttcgttctcgttggtttcaaagaacttcttgatttctgccttaatttaattatttacccaggaatcattcaggagcaggttgttaaatttctatgtaattgtgtggttttcagtgagtttcttaatcctgagttctaatttgattgccctgtggtctgagggattgtttgttgtgatttcagttcttttgcatttgctaaggagtgttttactttcaattatgtggtcaattttagaataagtgccatatggcactgggaagaatgcatattctgttgatttggagtggagagttatgtagatgtctattaggtccatttgatccagagttgaattcaagacctgaatgtccttgttaattttctgtcttgttgatctgtctaatattgacagtgcattgttaaagtctcccactattattgtgtgggagtctaagtctctctgtaggtctctaagaacttgctttatgaattttcctatttttttctagattagcccacaaatcctcaggattatacaaaactgtactttgaagagaaatgacaaatacttacttttctcttacagaagcatgttaagtgtctccatttagtcatgccattttttaagtctcaaaggaatatttgtaatttttgaaactataagaaagtataagtgcatatttatttaatctctgggcagaaaatgattttctaaatattaaagcaatgaaagaaccagcaacagaaatggctgattgatataactacataacaataaaaatatcataatatttttaaatacaatagtgcatgtttaaatacattataaataaaattaaaagaaaagggagaaactgggagaataatttaagggtgatgctaaatggcttctgctttgccacataaataaatgacacaaaacagtaaaagaaacactaatgcctcaaagaaaaatggagaaagaacttgaccagttttcggagaagaaatttaagatggtatagactattctttcacataattctgattcaaacatgcctctgcatgaccagctgtttttagatcactcgtaagtctcttttctttaggtgaataatacctactaggtttttaagctgactagaccctttgttaaatataagtgacaagctttagaagttttatttcagtatcttctcagtgctttttaatttagatctcttgacaaaaagaaatagagggaagtggtatcttctatatttcataaaaagaggagaaaaactttgctacttaatcgactgtagacatgtataaaccactgttcttttcgattatacattaatctcaacaccctaagagtgtactggcatttttctttattgtcatcaatcagtgggttacacatttagttgctttgaggatttaggatttagttgctttgaggaattaggacttgagtttttttggataacttccttttaaagttgagaattatactctgatatgactgctgaaagttcatggaatttgtgagtttatttaatagaatttgagaaagttattgctttgtgctggcatactctatgtgacggggatatagaaatataagttgtgccagctacaaagacaattcggggtatatgagtggaatagagtgcattcttatgtaggtgatttgatagtggaatagtatgtattattattagatttgaaaggagcccacacataataactctgtacctctttctagtttggaaatgattaccaaggaatgagggagccagtaattaaagtatcattttcgtaaaggctaaattagttatttgacttgacctatggtgatagctatacaaactctgatttgctcctcttgcccaggtcatttcactgaatcgcacatgtctgtttaaaacttcagctttctctctgaggacaaaacctgtcctcatgtttacaatataagctacaacacaactttacaacagattagtggaaaagtatgtgtctcaaggccagactactctgtaagagaaagggtgctcatttgctcattgccaaagctgctaatcaggtaagtcactcctcttattttggagaggagtgaaagaggggctgggtactatttacacctctggactggcattttctttcctggataggatataaaaagtaggagataaatatattgattttaatacctaagtttcaggtcatctgggggtgtgatgtctctctctcgggggagaagatcattaatgcgtcctgctcttcccttcatgaactccttttcccagtaccaacaattgacccttagtctgtcttctgggacaactggtaggcagtgcagatatgcagtggatcagaactgcacattagttaaatcaattctcagaccttgctgttagccagggatagtagtcattccctactctaattctcatcccaagtatgtctagcctcgtgatcaatatagctccaggaatgttattcagggagataaatggcagcataaagatactccagtaatctattatgatggcaatatataaatgtccctaagtgcagatttcccccctttaaaaaattcccatgtcaaagagacatgaaaattatctttcgtctgaaattctaagatccaaaacttttatgttaagtttaaagaaatcaactttcaaaatttatgttatccagtttttctttctgtccaatctcagatagcggcatgtattccacagtctagacagaattcagttttttaatcagcttcagtttgagctgccttgtattggaatgagtaaggttctttcatccctaagcctctcctgtgtcttaattattttatctttttattttgacctaattgtagattcacatgcaattccaagaactagtatgaagaggtcctatctgcctgcacctagttttccccagtgataaatactatcttacataaccacagtaccatgtcaaaaccaggaaactaacattggcgttggtaaaatccatagacattattcagatttcactagctttacgtgcacttgtgtgtgtgtgtctgtgtttgcgcgcatgtgtgtagctttgtaaaattttgtcacatgtgtagattcatgtggccctcaccacaatcaatgcagactgctccaccatcacaaagatcctctttgtttgtccttggtggtcacacccacactctccacgcttacctcatctctaaccccaggcaaccacgaatctgttttccatctctataattttgttatttaaagaatgttatataaatgaaatcatacagtatgtgaccttttgaaactgaagtttttgagttggcatcatgcttctgaaatctattcaatttgttgcgtgcctcaaaagttcattcctttttttggttgaatggtattccatcacatggatttacagtttgtcttaaccattccctgttggaggacatttgagttgttaccagtttttggatattacatgtaaagttgttatggacatttgtgtgcatgttttagtgtgaacaaactgtacatttctctaggataaatacccagaagtgctattgctcatttgcatgctgagtatatgtttagctttttaaagaaactgccaaactattttccagagtagctgtatcattttacattcccactagaaatatgaatgatacgttttctctacatcctaccagcattggttctgtcactattttttattttaactattctgatatgtgtactaataattcactgaggttttgatttgtgtttccctaaaagctagtgatagtgagcatctttccctgtgcttatattttatgtgtatattctttcagtgtaatgtgacaatatatttttttctgattttctaattggattgtttgatttttgttttctactattgagttttgagagtttgttatatattctaaaaatatgttctttgccaggtatgtggtcatgtgcctcatttttaaagttcgaaaataatactgaaacacctgatatttcaagaccaactccatagccatgaaattttaagagccaagcaaaaatttgagtgattggagctgtaatcccaggcaaaataattttccagaacccagtgtttagtctagtgcagattcctgttattgttgccaaagatgctaatggaaattccttgatatttgaggaaaggaaggtggacagagacaatcttgttttaagtcttaccaggatgccagtagatgtcattggtccaaacaccatgatctaaaaatttaaactgaactgtaagaaattactaatcaagatgcatttaccataaatggggagaaaatccacctatctataagcaggtctcccatcacagtagctgcccccgtgcctctggctataaaagaggcctatggaatcttcttgctaggggcagttttcccttgtccccacatctgttaaatcaagtgctacatccctaatgtattatttgtaatactttatagtaatcaatataagtataaacacataccaatttacctagcctccttgaatcaatgaaattcaactttagtggaggtgcagacccatgatggccattcttgatgtcccacctttgtgtaatttcttcttcttgagtgtgggcagggtctgtgactggcttctaaccaacagaatatggcaaaggtaaagggaggtcacttctgttattgttcattatgtaagcctctgtctggctggcagactcactctgagactctccttgctggcctgatggaataagtggccacattgatgaagcccatctggcaaggcactgtggacctactacaggtaaactttgagaggtgagggcattctctagccaagaaccagcaagaagccagagagctcactcagtccttcagtatcaaggcaatgaattccgccagcaaactgagtgagtctgggagcagattctttcccagtcaaaacatcagatgagaatacagcctggatgagacctcaactgcagccttataaggccctaagcagaggccttaactgtacctctcaaatcatgacccacagaagctaagggataatgtgtgtgtgttgcttcaagtcaccacatttgtgataatttgttacccagcaatagaaaatcaatacaacttcacccctacccagattttatttatttttgccacggaaacaatactgaaaaatatttttattcatatatctttatatattgatgcctttattttatggatagattttctaggagtgtggttactgcatgttcttttaaattttaataggtgatgccaggttgctttctaaagaagctctaatgattcacatgctaccagcaatgtgtaagcgtatcctttttcttttattcttactagcaatgggccctaatagaggtttataaatcctttcagtctcaaaagaataaagagatatcgcattgttactttaatttaaatttcactgcctaccagtgagtttaaccattttttaatgtttccggttacaggggttatctcttctgcaaattgctttttaaaactctgccaatgtttctcctctattttttatgtctttttttattgtaatatgtattatagatattaaacttcagacctgtatgttgcagattttttattcaaatctacttgttttctgttgactttgtttatgaaaagttttttattgtaaaactgaaaatttttgttaatagcatccatgtaccttctgtgtgtgaagctatagtagacctttgaaatccaagccctgttttttggttgttccaatagcaaattgtagcctccttgaggccatgggtttagagagcaactcttaaaaccttgccagcagtcttcatgatgccaataggttaatttatcctaaattctatttttaactcttgttgtatttcaaaacaaaatagaaggaaatgcaatttggggcagcatatttagtactatttacctattcgtggtatgagacatactttagtaggactctgtggactgtaacatagctgcttctgcattttaagacccagcctatagatctgattaagaaatacaataaaatcagctaagcttgagcttctcataagtgcctacaaagtttttacactaaaatgcggcctacattaagattagcctttattggagcaaaataaactctcttaactataatgtaatccctgccccattgggtggctttaagccatagctgtgccagcatgagtcagggcaagttcagccacagaaaaccacacagactatgattgctaagccccacactccctcaacagttaaaaatcagccacacagtgacgataaaagccacagaaatccaatgaagtccaaacccaggtggcttaaggttaccgaggcattgagagcttctagcctccttccctttctttctaagcatggcccacattctggcccatggtttattactgagaatttccaatccctgaacctttaagttagggctgaagagaatcaatcaatgacattcctcttcacctcctgagtttgggaaaaaaaaccaaaaagagcatacaggagtccaaacagatgatggggaaaatatctgatactttattgatgataaattagaaaatgccacttgacctatagccacactcagtctttctattctgctcccccaacctgtgaatcaaacttgcctactcacaatatcaggccttaaaaagacagaactgccctggtcaggaatgggaagaaaagatgtgtgtcctgaagactttgctgtctgaaaaaagagaaagaagctgaactgtttgtctgagttccttcttcccattggcaggatcaaagaagtctttcctcccttgggctagtgtaggcaaggaggcaaagagtaccttttcaggaagtagagctccctctccactatgggaaagtgaggaggccggggtgagtgagtgcccctcctaatattttgatagtgtattcatgaaagcctcttcatagctgatggggtccttagctctaatagggatttaggtggaaggttgggaacagatgtgtgacattgaagctgagctttaacagatgagtacaagtgtgctagatgtttggtagctagagtggcattttagacagaagaacaacataaataaagggagagccataaaattgcccagtgtgttcagggagcagccagggaatccagtgtggcaaggacatgggggaaactggctggagctgaagttttgagtaaggaaatcatttttacagtatttatatttctgaagaataattagtagctagagtgatgaaggacagcttttaaatgtagatatgggactcagcagtttgtcatgaagaattgtgaaaaagtctatctgaagaattgtgaaaaaatctatctctgcaatcttaatagaattcagaaacaaaaattcagattaattggggggagttaaaatagttaatactatcatatgtgattggagttgctttgcaaactcagagaaaagtcaagctcaagaaacacaaacatggtggcatctttggactgttgagattccatgctgtcatctttcatttacccagtatctcatcagttaaccaggctgtgaatttttctttgaaataatttcaaagacatgcttcactttcccattccccgaatgtcttcattgttttggctgctattacaaaaataccgtagtttgggtggcttaaacaacaaacatttatttgtcatagttttagaggctaggaattccaagatcaaggctccagcaggcctggtatctggtgaagccctgcttcctggcttgtagtagacagctaccttccccttatacccttacatgaccagagagtgagctctagtatatttctcttattgtcaggacactaattccatgaaaggatttgcctactgacactcctactggggactagggtttcaacatgatttttgggagaatacaaacatacagtccgtaacatcaactatcttcaccttttgcaggtatctattacctcaaaccttggtcatttttgcctgcattagtcattttaaaatattaacatttttatgtggttttggtattgtattatctttagagattagactcatggtacagtctgtccttcccttcatagaactggttgagaatttacacatacagagtcacataggcatggagtatgggtatctgttttactcaatgtgtgcttggatcaaggacactagcaggctttctgactctccccacactgaatttatccatcttgtcacaggtcagaggctgtgatgcacatctgagagggcttactgcatggaagctggaagcctggcccctgctgcatctgaagaagcagaaccaagaggaagcaagggaagagcacagagcctatttctaacttttgaggcaatgtgactcccactggaaacattgttcaatgaaagttaggatcttattgatttcgccaaattgatttgtttttctctgtccaagaggaggaacaatttacagagtagaaatagagtatgaaacattgctggtaatatcactggttctttctcctttaagagatcggaatataattttaagttttgattggggaaagaacatggggtgagcaggactagaattttccaccacattattcgtcttaggtattattctctaagttttaggtatatgccttttatttctaatttggaatcttcctgagactagagcccatgtatattgcttcaggttattcccataccaataaatattcagaaaagaaacagatttagctggaaatatgcaaaatgccatgtcagatgggaaagccttgctgtcactaaataactatgtaagattggcttgaatccaatgcttccacgtctttggaagatttctgtcagtttccctctttcttgtgatctcctctgactgccagactcttgtttccacctttgctgtcttggctgtgcatgcagttaattcagagatgattctcagaatattggttggttggtttacacacactcagagcatttgtgagtacactggattttactgttgctagttaaagggaggagtcccttgatgcatagctcaaaaacagcccatattctggattcctcctctctaacatcctttgtggctggccctcactgaagtttcctgtcttagttctagccccatacatcacactgttttatatccttttgtgaacctctctttttttcttttattgtctcacataccctcttttcattttttcctagaaattctaaatacttcagtctcaattttactatgaaagtgagttttctccagctccttttctcaaacatgcatatacaaatccattaaggtgctcaataaaggactgccaggaacaaagagccactctccttaggtgcttacatgccctatgaatataattagcaggtttttctattataattagaatattatcctcacatttctaggtcgattttctcctactcgaataacaggggaatgaatattaaaactgtattaagaagtctcagagttcatatcatatcaggcctcctaaaatatagtaagaaaatgagtttgataataagtaaaattttgcagaattttgtttagaggctcagaatttaaacattctctttcgttgatagtgcttataaaaacaacccctaagtattttctgataataattggctacatgactttcttagatataaataaaactagggacaatgaagtctttaacagaaaagaagaatttgttaaccgtattaaattaggattaaacacaatgaacaccaggtctctacaagctagagaaagtgcaaagtatgagaatgtagcacaaaattgttgagaaagtgtgagtgcttggaatggtaaatctgtggtgactgtctcttttcctggctggggagcctgtccctctaggttataagcaaccagtagtcctggtcaggggcatagcttttcctggtcattactacattaacatggaactgaggccttacaattctctatcatacttgtaattattagcatttctatgccatatgttctggaatcaatcacaaaatattatctttgcatgactgctatagggcgtattactcgattttctttactattttaattatactatttggtaacactagcaagtctgaattttaaacaacttccttaggttaccctgtgtatgtgtaattaatcatttcattgttaatggtatgatgacaaatactgaaagaaagttattctaaatggagcatagttattctaaatggcaaagactcagagactcattttagactataattataatcttgcagtggaataggagaataatcaatactcattagatatgtcattgagaatctactatagattcatgactaaactctcaaatcccagaaaatgtgctgagaatcatgcactagtttaaagagggagaccagggcagttgttatatttttaaaaaggctgaagtcatatatgagctgccacaagacaattcctccaaagatccaaaggtaaagtttcatagataatcaaaataaaatgctattagtgaattcagatgttcatagagttgtatattattcaataaatgatcaagcagataaagatgcacatatgatcagcactaatatgaatgtatatgtgtcactgaaattgaagttttaagtcactgtccatagagtgagtcttagataaccctataatgtctttataaaactcaatcttgccattaaaattgcatgtgatgccttaagtttgctggcatcacccaaagacaaccgacatgtgattctgattccacaccagtgtgaactcctgttcaggccccacttcttctgatagcagggtgtaccccactggctcttgcctatttagtcccttatggtcaaatggtgagcagattgatcactttaaggcagggggaaccaacatatctgtgctcattttcatggcattcttagctatttagtgaagcacatggaagctcaggaatggcagggttttagaagccatttgttttccctctgctccctttgctttccttaaggtgcagatctttcctatcttccaaaaactctgcatgagtgttccatccttgctctgtgaagctagaaatagtatctccttttctcagaaatatcttcatatttcttctgtgcttcttctttatcacttatcacgacctgcctggtagctatcatgttcctctctcatcccttagtattacagtgtattctctgaatcatctttgtatgcctgataggacttgcacagtctggcccagggtaggtttcaataaatgtgttggatgaatgatgagctgcaattctgccatgagattcatgagagtaacagacactgaattattgtacagcagcttatggtggcgttttatactctaaggttggagggagcttgacttagaagcttcttagcatctctaaaacatctctgccaagtgatctcccagctttttcttgaacatctccagtgatggttaacttgactcctctagaggcagtcttttccatttcagacatgttctaatgtggctctcttctcctctttcctgacaatattttgacctcaagacgcagatttattaccaactcagctaagggtactttaacttcataaggctgaaagtagtctcttgttttaatcagtctcaagcctagaactatccagattcttcctgtctttgctgaaatttccttcagatactttagtttttgtagttttgttttttcaaacagatttatggagatatatttgattttataaacaaaaacctgcacacatttaatgtatataatttgatgagtttggaagtatgcatatgtctgtgatgctatcaccattcttcttaaactgttatttcccttcatggattcaaagggttggaagagacctggagattagctagttcaacttaattttctgatgatccaatggagcctaagtaagaggaagggacttgctaaaggtcacacaccttactttcagccatcagctatacaggaaaggagggtgcattcccagctgctggcctgcttaaaggacccagtggctacttattccacaaatttcttatatgcagtaataccgtatgctccaacagaagcttttcacttttgagctacaatattaatctcatgaacttaatcacaagcataacaaatggtttttccctcttaatcccttacttgttcacttgctggtgtatcacccatgaccaggcagacaactgttttgtcttctgtcaactgattaaggagtgatattagatgggtgctaattcttaggaagatgagagaatcagaaattcatcataggaacatgcttgagtaataagtttgatgatatcatttttagctgtgagatagttttggttctcataaaaaggaaaatttgttataattttaagtagcatttaatgttatctactgaaatacatttgggtttagtacaggaaacagatgatatttggtctgaaaacactctgtgaatttacttttttttcacagattgttgcttactttttttaaaaattttatgttctactatgccagggaatgatagttatgttagattatgtaactggcaatagtaaattgaggaaataaaagatttgggttaaaaagtggttctgcttatgaggaacatactccaaaaagttgatattgtacatacctaaactttattcaggaactaaaatacagacaatctgtgggataatataataaattaaattttagggagattttgcttaatggggggtttccaaagtaaattatgattttactcttttccttatctttcagacatgccacttcagaaaactctttgtatctgcattttaaaatattgctttattttaaattcatattctggataaattagttgatttttgatgattctaaaaatttttagtagaaaccagttttaatcctgtgagtagaaaaatatgtatgaagatgtgggataggtgtttgctagcacagggtaggaagtacctaaaataacaagtaagtgtcagtgaggaaaatttgttaaatagaatttcataaataattctggaatgcatttgcaaaactacatgctgggtcatatttttctgtctcacgttatagccagtttaaccctcttactctagaaaagctagagctatttctgtgttctcaaagttgggttccaaattacctatccagtatcttccccccctacattttccacaaaatgaatgctccagcttcatcaatctcctttaagatccttgagcatatctacaacttctgtcctctgctatcgcagtttcctcactgatgtgcccaaggagcttgttcaaattcatgcatcgttgagggccaaatctggatcatctgtcagtttcattcaatgacaacctgtcctgatttacacagtcagaattaaatattcctacagcatattactaacacctctatttattgcttataccagctttgccttgtgattagttatttcatattgatctactgaacttaaattctgtgatctccttattgaccacagattattcctctgttcagcactccttattcttatccctgttacaattcttattatggtgcacaagctccataaatatttataaaactgatattaattgaataaaatattgtctagaggtctcagtcattcttcaatgaaacggaatgattattttagctgatttgacaccattgtaccaaattagtcttcaaaattgtatactaaagaaccagggagacaatgaaatatctaagatagaatcatttttaatatattggcatgctaaactttagaatgtatgatcaaaccacttatttcaataggataacatttaaccaaatgccttggtaagttgcttacccatctcaaaaggatattgataatattgttctatagagaatttacataaaaaggctatgattactgttaaccacaaatagtcctaagtagtaaaaatattgcctgaagtatttctgagttgaaataaaacatccagattataataacatttttctttttttttaggtatggtcttttaaaataaatactttactattataattgtcacgcctgttgttttgcgttagatgtataactaaacgtgttgtatagattatggtcaataagttattgggtaaatgttattttcctactattacctaaagttaatcttaccacctgatatggtttggctgtgtccccaaccaagtctcatcctgaattgtagttctcataatctccacatgtgggagggacttggtgggaggtaatttaaccatgggggtggctacactcatgctgttctagtgatagtaagttctcatgagatctgatggttttataagaggcttttccccctttttcttggcacttctccttcctgccatcatgtgaagaagggattgtttgtttcccctcctgccatgattgtaagtttcctgaggtcttctcagccatgccaaactgtgagtcaatgaaacctttttcctttataaattaaccagtttcaggcatttttttcatagcagtgtgaaaatggactaatacaccacctatacttttttcacacttttcattgagaaatgtaactttcacaaagaaaagtacatacaacccatattaacagttttacaaataactataaagcaaatatctgtgtcggttgggtgtggaggctcatgtctgtaatcccagcactttgggaggccaaggtgggtggatcactttgagctcagaagtttgaaaccagcctaggcaacacagcaaaaccctgtctctagaaaaaatacaaaaattagccaggtgtggtggtgtgcacctgtggtcccagctactcaggaggctgagcctggagaatcacctgaacctgggagacagaggttgcagtgagccaagatcactccagtgtgggaacagagcgagaccctgtctaaaaaataaaagcaaataatctgtgttaaaactacccagaccaaatagaacatttcatttaaaagatctggagtatctactgagggtagagggagaggaagctagccaagcacaagcatctccctgattatccctgccagttgcagactcattcctttcctctactgcttatactatcctggctttatagtgttaatgtcttctcttatctttataatttccctaaggaaaaagataaatttttctgtttttgaactttatataagtgggaccatttatatgtattcttttgtggcttgtttttcttaaccttaggttggtaaaatatattcatgctgttgtatgtgactttagtttgtccattcatttttaatactatacagtgtcctttaaatgaatataccacagtttatttatccattctacttctaaggcaatttggactgtttgcattttggggctattttgaacaatatgtcttggtgcatgcatttctctaaggtatatacttagcagtggaattgctgggtcaaagggtatgtgtgcctcaactaggctagaaaacaccacactgtttccagagtgcatgtataaatttatatttctaccagcagtgtatgacaattcctactgctccaaatcctgaccaacaacttgtatttacttttgcattttttttcccaatcttaagagtgtttagtgctaactcattttgtttaatttccatttactctattaccagttaggttgagtaactttttaaaaaacagaagtccattggtaatttggattttcacttttgcgaagcttttgttcaagttcagttctttgcctactcttctattgaagtattgttttatgtgtatttctcattgagtttactgtgtattgagtattgttataaagccatatgataagcagatgttcttaattttaatgtagttaaaattatctctttttctttataatgactactttttctgacttattaaagaccccctgtcacaaaattatgaagatatttacttttactctctcctcaaagtttaaaaattttgccctttccactctggtttttaattgattttatatatggatacccattattacagttccaaagattaaaaagtggccttccccattgctctggagtgctaatttattataaatcaagtgtccttgtgtgtgtgaagttgtttctgaacttaaaatatatttctttggtctaaatatctattcctgcaataaacatccactgccttaattaccatagctttatataggtcttgataactgggcaagtcctttctgccttatttttcttggttaactttggcctttttaacatacatatacatttgaaaatctacttgtgaacttccacatgcacactaaaataatctgctggtaatatgaaattcattgaatctatacattcctttcaggagagagtagttgcacacatataatcccagcacttttggaagccaatgtgggaagattgcttgaggccaggagttcaagactagcctaggcaacatagtgagatcctgtttttagggaaaaaatgtttttaaaaagctgggcatgttggcaggctgccaagtacacagggggctgaggtgggaggatggcttcagtccaggagttccaggctgtagagagctatgattacgccactgccttctagcctgaatgacaaagtgagaacctatctcataaaaaaaaattcaggagaaatatttacagtcacaagtttttcaatatgtgaatttgctatatatttcatttttctgaagtcttctttaatgtaatttaatcccattttatgattttttctgtagtagccttatatatccttgttggacttttaccgagtcacctgatacattttgatactgctatataaacccacctttgtcattgatcatagctcatcaaaatcttcctagactttgcttatcatttcttttcactaacttgtattctcactgttttttcttccactgagctactctctttattacatgaacataatttgaacccattatgtacccattgttaaaagcccttcagtagctccctatatactctatgtctttttcctttcatggccaatgatttaggcatgatgggccacgcttctgtctcttccttcttacctttcagccagtcattttccaacctgctgcgatttgattgcttccaccaccacactgcaactgctctgccagaggatcctctcacaattaaagccaaggactatttttcaaggtccttatgttgatttttcagcactgtagaacattgctataatgctaaaagtattaatagtagccatagtaattataactggtatatatcactggtaaatatcactggtattattatgactatacttatagctataattataattatagtaataataacactataattatatattattactgtaatatataattactataatataattataataatacataattatgttaataataatatgagtgataaaattaataccaacttactgagtatcttttgtggggcagcactttagagccactacttttacaaaccagatattattatcaaagatgagatggcctttccattgtccaaggtcatgaagagtaagttctacagggaagtcagcctcatgcaagagtctaaactctgcccaatacttgtctctgccttaaatccacagatctcgctcgcctcttgttctcctctagtccatcctgcctctttttcttactctttttctctgggttctcttccactgcccatatcctcaatctggctcctcaccagggtcttgccattggtccttttctcactcttcctatccttgcttatatgatatcctctcccacaacataagctttcacttaacataccaacttcattatatctaagacctagcatggtgcctgtcttgtaactattgaatggtaaactatcttatatcttcattggttggagtctagacatcccaggtcaatatttacaaaactgagctcataaatctttttctcctaaacttccttctcctcctgtgtatcttatcctggttaaaagcatcaccctttatccatttgctcattccagaaaactggtaatcatagaactgtttttatcatgccagcctcagaaatctcttctaccaatgcagatttctttgcattctggtctttagtgacccatctcctggtgctgtcccatttggagcacttatcagcttgatatgttgatgatttgatgaactaataactgcagattttaccctttttgggatacagtaactattttttcatatattgaaaaataattctttcagtttagcagcttacattttgatattgcccaacagagtatcatacaagtactcacttactgatttttttcaacacttttaggtgtctaaaattatggaagagaaaacttgtaaagaaactgatattcaaatactttggaacttagttgagatttttgcaatttctttttcaatgttcacaaaagtgtggctgagaacatcagactgtgcgcttcattaaagttaatgggtgaacaaccaaatatttggggatacctcagttttttcaaatggagtcacattaaattcttgctgcaggggtttctctgtgcagtttctgtgatggtttttaggggtctcttggatggcgtggctgtccttctgcagtgccacagggaacaaaaccgaagttgttaagttagaacagatacttttataccaaacatggtgaaattggcaattggcatttttgcataatgatataagtatatttgacggcattggaaatcctaaccagcattatatataacttaggagattggttaatgaaaaatttttaacagtgttttatatagtgagggacaccatgatgtgtagtttgctattgacagtgtcactcttggctgtcagagcccttcagggattacccaggccaaaggggtcatgctttgctttgagacaggtgaagggacacgaaggcccagctctgtcacactctcttggcacattctgtcctcagaattccctatagtgtcagctaaggtttctgttgagactgtcacagcttgacatcgtcctctgcccaatcttccttctttctctttctttccatttccttccacaggcactgattctgtaataaacatcctgtatgctaatcttcatcttagagtctgcttccaagagaacctaacttgcaactcccaccatgtaaaagtttgatgcagctttgccagagaagcataacattaatgggaatgctgtgaggcttttccctagaacaggaagctcacaaaggttaccaagtaaacagattcattcatcctggcaacatttacacatccttctcagggatgcagagatgattaaggcaagattcctattctctggtgagggaggtaggcacaaacaagtgttcacaatacaacatcgtaagtgctattgtggaggattgcacaatgcgcttagggaacacagatgagggggcaattaaaattgcccaggtatcctggaagatgaggaaacatttgatctaaactgaagaaaaaaaccatctgatctgaattctctttcctaggaaagagaatggtttgggagttgcttgttttgcagctgtgtaagatgtctggggagaagcaaagagctaggctgggatgaggatgaacaatggcaggaagtaatgaaaaattgagctaggaaatagtttggggccagagctaaagaaggagtggttgccagctgggcgcggtggcttacgcctgtaatcccagcactttgggaggccgaggcgggcggatcacgaggtcaggagattgagaccatcctggctaacacggtgaaaccccgtctctactaaaaatacaaaaaattagccaggcgtggtggcgggcgcctgtagtcccagctacttgggaggctgaggcaggagaatgacgtgaacctgggaggcggagcttgcagtgagccgagatcgcaccactgcactccagcctgggcgatagagtgagactccgtctcaaaaaaaagaaaaaaaaaagaaagaaggaatggttgcctagtgacaatgtgtaaaatgaggagataacgaaagatacctaaagaagaccaatgtttcatatgggggggcattaaggaagagcagctagtgaaccactggagaaccatcaaagtggaagaaggaaaactggaatattgctggagagtagagaatttccgaaaggcaaaggtcaacactgttacatgctctagagatgttcagcaggttgagaacttcgaaataagaagccctcgagctctagcgaaatgaacacacaagtggggatacattcataaatgcaacaccatactgtaaaaaatgactacaggttcatctgagaaaaaaggataaattttgcaacgtgatattgagtgagaaaagttagatcttctacaaagatgggtttagttaaacatgtagtgcttggggaaacttgtataggtgacacaaacgtaaaagaaagctagaaaaatgggtctttgtaaggagagagggggtaatgatctgaagtaggcatgaggggatctgctgtgttctggtaaagtcctctttcttgacctgagtgattttttatggatatttcccttgggataaacctttgggctgtatgtttctgttttgtaaagttttctgtgatgcaattcatattttccaataagtagggttttaaaataagcaattggaaatgattaatttcagaatcattgtgacttttgatgagaagtttgagtagaatgtttgatggtagaagtctgattgtcctgggttgagaaactgaaggaacaaaatccagaaatgtgaattatttcttttgtatgttgatgggaaatagaaaaagataatgtagccctttggagtaagtagcctttaaactagtaaacttagtactcccaaggcaaatacccttagttaaaatctataactcatacaagtagataggagtaagttataaacaaccaaatgaaacattagtagtaagtgatgaaaatgcatggtggcaagcaaataacaattttttataaatcaggtttttgaataaactttgttcatatttgtcattttgtgaatacataaatgattcctagaaacttggagttgtaacatgggactgcttgaaaaaaaagataaactatctaaaaggacaggcaattcaatatatgtcaataatcatttcaaggcactagaatctttgctatattagtgtttttatagttttagcatagtatatgtattttgtgatatttttgatacagcaaaatatgacacatttaacttcattaaaaacagaattttgaagtccacacttcaaaatttctttagagtcaagaaattaagaataacaggagacctttaaggtagttcatttaacttgcttatttgacagattgggactccacaggcttggagactcaatgtcagtacccaggtcacacagttagtggaaagcctaactaaagcttgggtctctcacctctcagtctagtgataattccactcagtacctttgagcaatatctcataaagcaaatcttgttacctaagattctaaacagggtctagggcattgttataatagaatttggtctgtacatataaaatgttctgtatttggaaattgttttctttcaagtcataattctaaaaaggtttaatgcgtcattaagcataatttgtattttgtcatggggtggtaacatttatttagggggaattatctcttttgtaaaatgtgattagaacaccacttgattaatggaaattctctttaaatgcaactcataatacaggcttaaatcctgatatagaaggtcaactggatcaccttgtcactttctattaatattacaatatgaaaactattgtgttgcttcattacagacccttaagatacctttgtggatggcaagtgcttctgctttcatcatagatagtaggaaatgaattcttggctataaaggtggtgggccccagacagtactccccaaacaaactgcggccttcagagtttatttacagttgcccctatgcttataggaaagttatcctctttgaacagtagtgtcccacgtgacacatcataaaatgcaaggcaaaacttaccaattcagttcacatcaggatttttttgtaaccattgattttgttataaggggctacatctcttaaaacaagaaatttgtattcagcagcctgaaggtctttatagccattgaccttcccagtgactgccaacaaaatcctttagtttatcacttcactgagccatgtcatcactgagaatgctcagctcatttaaatttagttgacctcgtggtgtcattccttatgtataagaactaacaaacacctttgccacactgtaggtgccttgaaggcaggtgatgaggctgggtaactcagctatttagcatgacgatatgcacagagtgagctctcagtaattattagccaaacaatgataagtgctttttacttgtatcactttcttgattctgtacttccaagagtagcgaacttactcttcgacctctgggtagcatttgacaataggattataagtgctttctcctttggcctcagtggccctttactgtgcctttagtccagtaggttgaatttgcaatctctcccttgacatcattcctgcaatgttttgtgcctgttagcaggaagacggccttctatgactccttctgttccctctcctctaagattaaaatgcatttagcacattcttgaattttttctatgaatatttatgtcaaatactactattattgtatataagacaaagtaaagaaatataataaaggtacaatacataaaataaatagaaacatccaggtgtaatgtagtagtatgctcaattaaatacatattttgttgttgtctttccaggtagtttttttttttttatggttttaacattccttgacttacttacaacgctttcagacactgaaaaacagccacagggcctggctaggctgagatccctcagaggcttcctgcaggcaattgcagctttgcctattactggcctgaggtggctgttcttactggagacttcaccccttcaagcccaaaatggaactgcagttgtcccccaaattctgagctctcctgggaactcaagaaatccctctcagtagttattgatttctattccttttaatcatctttcatttgcatttatctcataaaccagtagatgtttgcacatttgacaggtaagtttggggaaaatgcatactttaatgtatccatggagtctgcgagttaccttcctattcccctcatctgagggcctcattttcctaaaaagacttgggattatctgagaggccacttccctaatataagggaatgctttttccctccttatagttctctctttttgattctctaattattgagtcttaatcataaaagtttcttattatgaaattatttacttatatcagctggcattaattgttttctactatctatctccaattcattttctctactttatgctgaagatgtctttggctttcagagagatttacatttttcagagtgctttcaaatataaatgtatataaatatatgtgagaatttctcattaaccttcacattgacagtgtgaaataggtaaagcaagttttacaaatgtgaaaattgagagtcagagaagttatgcaactgctaagttgcctagctgataaatagatatgttcacgctgaaatttgggtgtaaggattcagaacacagtgttcttccattatcttctaccagcatgatctcaccattatatggtcttgctgtgtccccaccctaatctcatcttgaattgtaactcccacaattcccatgtgtcatgggaggaacctggtgggaggtgattaaatgatgggggtgggtccttcccatgttgttctcatgatagtgaataagtcttacaagttctaatggttttaaaaataggggttccctccacaagctctcttttcttgtctgctgccatttgaaatgtgcctttcaccttccgccatgattgtgaggcctccccagccacagggaactgtaagtccaataaacctctttctttcataaattgcccagtctcaggtatgtctttatcagcagcatgaaaaatggactaatacagtaaattggtaccagtagactggggtgctgctgaaaaggtactcaaaaatgtggaagcgattttggaactgggtaacaggcaaaggttgggacagtttggaggtctcagaagaagacaggaaaatgtgggaaagtttggaactccctagagacttgctggatggctttgaccaaaatgctaataatgatatggaccatacaatccaggttgaggagatgatgaacttgttgggaactggagtaaggtgactcttgctatgttttagcaaagaaactggtggtattttgcccctgcacagagatttgtggaactttgaatgtgagagagatttagggtatctggcagaagaaatttttaagcagaaaagcattcaagaggtgacttgggtgctgttaaaggcattcagttttataagggaagcagagcatacaagtttggaaaatttgcagcctgacaatgcaatagaaaagaaaattccattttctgaggagaaattcaagccagctgcagaaatttgcataagtaatgaggagccaaatgttaacccccaagacaatggggaaaatgtctccagagcatgtcagaggtttttatggcagcccccccaatcacagttccagatgcttagaaggaaaaagtgattttgtgggcagggctcagggtccccatgctgagtgcagtctagggacttgatgccctgtgtcccagccactccagcctgggctgaaaggggccaaggcacagcttgggctgtggcttcagagggtgaaggcctcaagtcttggcagcttccacctggtgttttgttgagcctgcgagtgcacagaagtcaagaactgaggtttgggaacctctgcctagatttcagaagatatatggaaatgcctggatgaacaggcagaagtttgctgtagggacagggtcctcatggagaacctctgctagggcagcgcagaagggaaatgtgggatgggagcccccatgcagagtcactactgtggcaccgcctagtggagctgtgagaagagggccactgacctccagaccccagaatgatagatccactgacagcttgcaccatgcacctggaaaatccatagatactcaattccggcccacgaaaacagccagaagggaggctgtaccctgcaaagctacaggggtggagctgcccaagaccatgggaacccctgtcatgcatcagcgtgatctggatgagagacatggagtcaaaggagatcattttggagctttaagatttgactgccctgctggatttctggcttgcatggggcctgtagccccttggttttggccaatttctcctatttggaatggctgtattttcccagtgcctgtaccctcattgtatctaggaagtagctaacttgcttttgattttataggctcacaggcagaagggacttgccttgtctcagaggagactttggactgtggatttctgagttaatgctgaaatgagttaagactttgggcggctgttgggagggcacgattggttttgaaatgtgaggacatgagatttgggaggggccagaggcagaacgatatggttttgctgtgtctccacccaaatctcatcttgaattgtagctcctgctgttcccacatgtcgtgggaggaacctggtggaagataattgaatcatgggggtgggtctttcccatgctgttctcatgatagtgaatgagtctcatgggatctcatagttttaaaaatgggagtctccctgcacaagctctcttctcttgtctgccgccatgtgagatgtgcctttcaccttccatcatgattgtgaggcctctccagccacacggaactgttaagtccaataaacctccttcttttgtacattgcccagtctcagatatatctttatcagcagcacgaaaatgtactaatacaccctactatcccacagatggcatgtggcttcccatctgtttgtgctcacctagctccttctctcaatgaatcagaagacccactttccaaggctccattcaagtctccctccttcctaaaagctgttcctgacaaaaccagtctagagttattttctgtaaatgcttgttatttaaggcatttattttgtatttcctcataggctgttttgtatggttatttaactatgccaaactagatgtttagagataaggaatcaaactgaaatcaaaccaggcaagaagtacctagttactgacatttattaggggtcttaggaattgcaatttgggagacataaactcaatatgacattgaattgtgttcctaaaggaggaaggagagagaagggttttaaagaagaaagaaggtgaaagtttaaaacattacaaaagttgcttttcaaaaatcatgattggctagggcattgtaaagtacatgagtccatacacagctggctgcaagagtggttggctaaattaagcaatgttccagggtgctgtggtctttgtgatttggaccagttctaaagttcacaagaagttccaggtacacctgtctgtgaatgtgcagaagtttctcaacaaaatggctccaggctccattttagatgttctgaatcatagcacagccattttggagataagattttatggggaaaaaaagtgggatttggagccatctgggtttgggttcaaatcctgactgttacctaccagctttcacgaccatgggtccctgctaactgatttgtaaagtggggatttattcagaaaaacatttactgaatgcatactatatcccaggtgtgcacaccaatgaacaagacacacaaagactgtgagagagataggcaagtaaaacagattgtcaagagttgcaagcaatattaaatgattttaaaaataaaaacagttgataacatagtcacagcagaaagaatccacattagagaaggtggttgtagaaggcctctctttgaggaagatgatactttacctgaaacttgactgacgtgtaaagccagccttgcaaagatgtgatgaggagttgttcatgcaggataacttaaggcttgagatagcctggtttattagaggaatagagagaaggccagtatgggtagttgctgaagaaggaggcagcatatcatgtggggattttaagcagtaattaggagtttgggttttattctagttgcaataagaagtcaatgagaagggtaacaaggctctctggctgttgggggtgttgaatggattaacacagaaaagctcgtgatacaatgcttgatagttaacactttaactgtttaacatatttttattctgctttcatatgtgttttattattaaaactacatcattaacttctcaaatacagggcctatatatcatgctattgcatgcacaatgtggcactctatgacacacataacttgatcaggcttgttagatgtgagtgttaccccagtgcaccactaggcaacagctttttccatgcagatgacttgcactgttctgagtaattcagctaagctgcctgattctgcccatttaacatcatctcatacacatgaggctatctgatgagtctgtaataacaacttgcacacagtggagtgtgtaagcatgcataattctcagcttgatctatatttaattaccattctggaataacattcacttttgtatgattatctaaaaaaaaaaaaagaacaacacaagtataaggaatgaagaatttacttagcattttggaaagggactatcttcagaaaagttttttttttctttttatttgccacaccatctgcttttgagataagcagaactagtgagttctctattgagatacatactgttacttagattttgaaggtttatttcttcttagaaatgccaagtgtttagatttttctgtgctttatagcatgtattctttttctctctgacagaatagagatcaagatagagacccctctatctgggctcccttggtaaaggtttcttcctgaatggaagtctcccaagaggtatttgtcactgtttctatgcataagaagtaggaagatttttatatttttcctttgtatgttcacattcagatcactcactcagggacatgcactgatttttaaattgtctgctgtttggaattagagatgcctcttgggttttatgcaacttcaaatctgagccaattcagctcccctttgaattggtggccctttttgttgtttattctcatttttttcatagaaggtcaccttcaaatgattaataggtgcactagcttgagcgtcaacacacatttaaaaacatttgtttgattttcagccatctagctcactttggaaacaatcaatagacagggtaaaactttaataagttaaaggcaacccagtattttgtattattctgttttcctcctcttaagtcttcaagctccatatttcctttcgacaaaaacatcaaataaagtccaatagtaagaaagtagcaaagagactaaattaaaagtattcttattcctttgatatactcagtctttaatttaagtgtgatttaatttaacttttgtcttctaatggcaatggaaaattcctgggggaacagatcatggcatgtcctcgtgtttcctctacactgccaagaaacacatcgtagattgaatagacactcaacaaacacatagtaaattcagtagaatattttgagacactagatttgcattgttatttgatgactccctgctgcaacttaaagcttcatgatattccacttgtgacagtaattaaactatatttaacttcggagcccttgaatttggcatgctgcaaggatagagcactaacaaggccttatcttatgctgagtacactgctgcatttatgctgtataattcaggccctccagaagaaagtatatgtactccttattttaaagactgaagacttcaaaagtgagaatgcaaatgaggatagcttcatttcgttcctcttaaatctgtgtagtgcagtacagcgttttttgaagccctttactgaaggtcactcagtgtgaggctagtgatgttttgatgtctagagcactgacagtttttcctctccaaatttttgaaacaaagcctataaatgacagtgaaacaaattatacttttcagagaaaaggtttcatgaaaataaaaatatgattcatttctctcagaggtattgtgatagattttgacaaaccattagcctgtatctttttctcagaagaatgggggtgagttcatggctgtttggggagaggttctttgggccaccggtcctcaatccttgcttaattctttgcacactgagaaacactgtgtggacaagatttcttgccctaaaccttgaactgagccatgtactcctcccaaatcagcttcccttaatacagttttggatctacatgcatgaactcctcctacataattactatatttgttgacacgtgttgaaattgaaaagggagaggtagatgatgtatatttaacattttgacctgtggactctgatgcgtaatatttctacatcgagaatttggaaaagatgatctcatttattaaaaacagttatgctgttaggagcattgtttttagatttcagaatagaatactaatggttgtttagaatctattaaataggcaaaaaactttaaataatcaatactcaaagttacaaagagtttgaagatggtattcttgtatattgatgatattattgcttttctaataattggaaatcaaactgggatttgttctaaaattaaaaatgtgtataatcttttcccaggaattccattttctgaggaaataactgaaattatggagaaaactataagcatgaacaaactgtgtgaggtgttacgtgcaattgcaaaaccaaaccaaatcaaaatccaaataaataatagttgtagaatgattatgaaaattaagatgccttcactcagttgtatattatgaggccttcaaaatcatggtaaattggtatcataaacatggtaaaactgtttattgtacaatagtaagtaaaagcaggctgattttcaaattgtattattctaatactataagcatcagactggatagaaaggaatgtattaaaattataatattagttgtgtttgggtgatggggttattcatttattcatccaacaaatagactatataaactacatatattttcatttaattcttgtaagagctctgcaaatttgcattgctatccccattttaaggatcaaaaatacacaaataataagaaatttagattagatgtttagtgttcaagtttgttgttcagtgatcattccaatactgtggatataaggtttatcaaaggcttacctaaggactacaggacatgaaaattctttcaaacaacccagaaaatctacactttcagatactaagattatagttcaggtcaaaaatctgattgagacaattgctatttgagagagaaaactgagtaacctccttcaaacctacagatttgaaaagtaattgcttttgactttaggtatgttattttgtttctctatagttcaatttcctcatcttaaaatgctcataagaatcacagggctgttttgaggattaaatgcatacacacacacacacacacacacacacatatatatacatatactatacatgtactatatagtacatatggaatatttgtaaatatagacttcatatataaaatattatatatgtatagtctctcacaccagagcagtgcttgacacatagcatgttctcaacacgtggcagctagtattgcaattctgttgctttagttgtaactttactttatagtatgctatgcactaccattctttattcaatatttcttgattaaattatctgcttattcctcaaattaacttcagtcctaactgccaaatttcattttaaaaactgggagttaagctatggagctgttaaaatactgttttaacaactctataccttaattacataaatatataattttttaataccgtcttcccattcatataggtctggcatatttttggtgtttatttctaggagttacaaatttgctactccaattgtgaagtggagatttttcatagtattttacattgatttattagaaaagctattgattttgattggatattcttgtatctggtcaccattatgtgctttcatttcagttctagttggtttttgagattattttcttgtattaatgaatagacaaacaagtggtctgcaaaatgacattgattttcctttgatatttaatgattgatctctgttcttgtcttattgtattggctatgtacaattctttgtaattacattcatagtagatatatttgtttcatttaaaatattttctgcccaggctggagtgcaatggcgcaatcttggctcaatgcaacctctgcctcctgggctcaagtgattctcttccctcagcctcccaagtagctgggattaaaagcatatgccgtgatgcttggctaatttttgtatttttaataatagtagagacagtgtttagctatgttggccaggctggtcttgaactcctggcctcaagtgatctgcccaccccggcctcccaaagtattgggattacaggcatgaaccattgcacctggcccccattcatcaatttaagagagatatttatttattttttaattcagtgtaaagtttaaaactaaggaattagccttgaattttatcaaagactttttcctcacttccaaatgatcatgtcagtaaacagttacaacactgaatcatattaatacatttttaatgccaaatgatcattatatttctagaataaaccctatttggtaattgaataatattctctcaatatccttctatatgtgctttactcatatattgtacttaggatttttacatgtgtttttcataagagataaaatccacagtgaattgagtgtgtatgtgtgtatatattatatttttccagttttgttatcagtttcacatgcttttatagaatcaaagaatgtattaactttcatttcttatcattggttgaagattgtagctttgataaaatttaccagttaagtcatctaatttcagtaaatttggggagagataagtcttttacatttttcaatttttttctacccatagtgatctgtggtcactaatctatgaaaaatttccaacttttgttttgtcaatgtgaaaatttacattattttttgtaccatatagaatttcttattttggcataaaattttatctaatttttaagcacttgactatctttaccataatatttctcaccacccccactcccatttttatttccaatgtggtttacttgcattttctttttatttccttgagtaaatctggaagaagtttgacaatatttttaattttttaaagtcttctattggttttatttttggtgtgtttattttaatatgttttttattctattctatgaatttctgtgtttttgtttataagtttctctttcaattttccttggatttatttatttatttattttttttttagtttcttgagtttcatgcttatctattaatattttgataatgctgaatttggatcaaaaattatatttattgtattctctgctatattacaataaggaatataaaatatttatctttctatataattctttttgctctaaacacactttgttattaatatatggctattactccctttttaaaattgttgttgctggtattcatccagtggatacatctaactcttcatttcttacctttctgtaacatttcattttttattgacctatttgtttatttattttataacttgcatatagctggatgtttgttaagccaatgaataagtttctgtttaataggaacatctaatttatttttcttgtgatcacttctatattttattttctttttgcactttcattttatgacttcttttttttgtttatttttacttattttaaggtcaaactgattatgtttcactatctactacaaaatagtttaggtattcttttattacaattctgctaatgtatatatttgtataaacatactgagttttcctatcagtttcaaagctcaatatctatagcctttataagacccccccatttgcacatgtacaatagagctttaacatatttattttcctttccctttgttctctgcaggattttgttaaaaaccaagaatttaagttcttgattgtcattcttttacattatagatattttactttgactattattttaacatgtaactacttataaacaattatttattcagctttgtatacatattacacaacttgcttaccactattacttaatactctgtctccttttgttttgaattcatttttgattttgctgcaatgtagtataaaaaattttttttcaaaaaagatgcatgagtagcaaactttgtatgtctttatatatctgacatacatttatttatttattttttattctttttttcttcttttctttttttttttttttttgagtcggagtctcactctgttgcccaggctggagtgcagtggtgcgatctccgctcactgcaagctccacttcctgggttcacgccattctcctgcctcagcctcctgagtagctgggactacaggcgcccaccacgacgcccagctaattttttgtatttttagtagagacaaggtttcaccgtgttagccaggatggcctggatctcctgatctcgtgatccacccgcctcggcctcccaaagtactgggattacaggcgtgaaccactgtgcccggcctatttattttttattatactttaagttctagagtacatgtgcacaacgtgcagggttgttacatacgtatatatgtgccatgttggtgtactgcacccacccattaactcgtcatttacattaggtatatctcctaatgctatccctccccactactcccaccctgcaacaggccctggcatgtgatgttccctttcctgtgtccaggtgttctcattgttcaattcccacctatgagtgagaacatgcggtgcatggtttttgtccctgtgatagtttgctgagaatgatggtttccagcttcatccatgtccctacaaaggacatgaactcatccttttttatggctgcatagtattccatggtgtatatgtgccacattttcttaatccagtctatcattgatggacatttgggttggttccaagtctttgttattgtgaatagtgctgcagtaaacatacatgtgcatgtgactttatagcagcatgatttataatcctttgggtatatacccagtaatgggattgctggatcaaatggtatttctagttctagatccttgaggaattgccacactgacttccacaatggttgaattagtttacagtcccaccaacagtgtgaaagtgttcctgtttctccacatcctctccagcacctgttgtttcctgactttttaatgatcgccattgtaactggtgtgagatggtatctcattgtggttttgatttgcatttctctgatggccagtgatgacgagcattttttcatttgtctattggctgcataaatgtcttcttttgagaagtgtctgttcatatcctttgcccactttttgatggggttgtttgtttttttcttgtaaatttgtttgagttctttgtagatcctggatattagccttttgtcagatgagtagattgaaaaaattttctcccattctgtaggttgcctgttcactctgatggtagtttctttggctgcacagaagctcttattttaattagatcccatttgtcaattttggcttttgttgccattgcttttggtgttttagatatgaagtccttgcccatgcctatgtcctgaatggtattgcctaggttttcttctagagtttttatggttttaggtctgacatttaaatctttaatccatcttgaattaatttttgtctaaggtgtaaggaagggatccagtttcagctttctacatatgattagccagttttcccagcaccatttattaaatagggaatcctttctctatttcttgtttttgtcaggtttgtcaaagaccagatggttgtagatatgcggcattatttctgagggctctgttctgttccattggtctatgtctctgttttggtaccagtaccatgctgttttggctactgtagccttgtagtatagtttgaagtcaggtagcgtgatgcctccagctttgttcttttggcttaggattgacttggcaatgtgggttcttttttggttccatattaactttaaagtagttttttccaaatctgtgaagaaagtcactggtagcatcatggggatagcattgaatctataaattaccttgagcagtatggccattttcacgatattgattattcctatccatgagcatggagtgttcttccatttgtttgtgtcctctgttatttcatggagtagtgctttgtagttctacttgaagaggcctttcacatcccttgtaaggtggattcctaggtattttattctctttgaagcaattgtgaatgggagttcactcatgatttggctctctgtttgttattggtgtataagaatgcttgtgatttttccacattgattttgtatcctgagactttgctgaagttgcctatcagcttaaggagattttgggctgagacgatggggttttctagatatacaatcatgtcatctgcaaacagggacaatttgacttcctcttttcctaattgaataccctttatttctttctcctgcctgattgccctggccagaacttccaacactatgttgaataggagtggtgagagagggcatccctgtcttgtgccagttttcaaagggaatgcttccagtttttgccaattcagtatgatattggctgtgggtttgtcataaatagttcttattattttgagatacgtcccatcaatacctaatttattgagagtttttagcgtgaagagttgttgaattttgtcaaaggccttttctgcatctattgagataatcatgtggtttttgtctttggttctatttatatgctggattacatttattgatttgcgtatgttgaaccagccttgcatcccagggatgaagcccacttgatcatggtggataagctttttgatggctgctggattcagtttgccagtattttattgaggatttttgcatcgatgttcatcagagatattggtctaaaattctctttttttgttttgtctgtgccaggctttggtatcagtatgatactggcctcataaaatgagttagggaggattccctctttttctattgattggaatagtttcagaaggaatggtatcaactcctccttgtacctctggtagaattcagctgtgaatccgtctcgtcctgggctttttttggttgttaagctattaaatactgcttcaatttcagagcctcttattggtctattcagaggttcaacttcttcctgggttagtcttgggagggtgtatgtgtccaggaatttatcagtttcttctatgttttctagtttatttgcgtcgaggtgtttatagtattctctgatggtagtttgtatttctgggggatcagtggtgctatcccctttatcattttttattgcgtctatttgattcttctctctttttttctttattaatcttgctagcagtctatcaattttgttgatcctttcaaaaagcagcttctggattcattgattttttgaagggttttttgtgtctctatctccttcagttctgttctgatcttagttattttttcccttccgctaggttttgaatgtgtttgctcttgcttctctagttctttaattgtgatgttagggtgtcaattttagatctttcctgctttctcttgtgggcatttagtgctataaatttccctctacacactgctttaaatgtgtcccagagattctggtatgttgtgtctttgttctcattggtttcaaagaacatctttatttctgccttcatttcattatgtacccagtagtcattcaggagcaggttgttcagtttccatgtagttgagcagttttgagtttcttaatcctgagttctagtttgattgcactgtggtctgagagacaatttgttataatttctgttcttttacatttgctgagcagtgctttacttccaactatgtggtcaattttggaataagtgcaatgtggtgctgagaagaatgtatattctgttgatttggggtgaagagttctgtagatgtctattaggtctacttggtgcagagctgagttcaattcctggatatccttgttaactttctgtctcgttgatccgtctaatattgacagtggggtgttaaagtctcccattattattgtgtgggagtctaagtctctttgtaggtctctaaggacttgcttccaaagatcaaaagagacaagaccataatggtaaagggatatatttattttttaacttaaataatttttgtctagataaaaatctttttccaccggaattttgtagttggtctttgcccccttctaggcttttattttggagattatacaataattatgatgccagtttgatttcagttcttttgtagtatttttttcttccttggcaagataatgtttgtttctccttatctttggagttttcaaattttattaggtggtatctagattgcattccacaaatttgccccacccccactgcaacattcctataaaaattttatgaagtgctcactctctgaagatgttagtgtttcattatttccagtaaattttcttttatgaatttcttcatcattttctgcttcttacttttctcttgataggtgtcagttcctttggttctctcctctgtgactgcttttctcttattatttaatgttttcattctgttgcactgaacactggagaatatctcagcacaaacttccatttcacaaattagctttaagcctatatcattctgatatttggtattcattttaattttacatttaaattgtcttatttttaattgcttctttttaagagtaacctcaatcatttttgtgggtgtaattcttttcaaatctctaagaattctatttagtttaaagttttctgtgatttctttttttctttttctttcttttcttttctttctttttttttttttttttttttttttaactgagtcttgctctgtctcccaggctggagtgcagtggggcaatctcggctcactgcaacctttgcctcctgggttcaagctattctcctgcctcaggctcctgagtagctgggattacaggtgcacaccaccacatccagctgatttttgtatttttagtagagatggggtttcaccatgctggccaagctggtctccaactcctgacctcgtgatctggccacctcggcctctcaaagtgctgggattacacgtgtgagccaccgtgcccggcctgtgatttcttttattaaccttgtttcctcagatattagctccttggtttggtctaacaccagttttcacattgttagattttctgaaacatacttttgtatttctaattgaaggctgagattggtaagcagtgatggttagagatgatcttcccagcgaaagtgattacaattcttgcagagagtgaatttatattctaattttagagcagctttgtaggcagagagagtgcatgtttggaccaggcaaaccttcttctaggttacccagagagtttgcctgatggatgcaggggctgcctcttcacaaagggaccagaagttatctggagcaccactggagtgctctcactcttttgccccaaaaacatctgtacgttttctatggtagagtctccattttatttacagaactctaggctagaagctcatgatacaatcagcagtacagcaattctgcagctcaccatccaatacccaactgtgcctccagtccctgctgtctttgatcttggtgttcttcatgaattctgagaggaacactcactttgttagtagccttccctcatgtcttttcaatgctacaggttcagctctattcgatttttaccagcaatctgatcccatctgcctcaaacattctagaaattctcccactgttctggtctctggctggcatccttcccaggtttctagcgctaccatggattcatccttatttttaaatctctgctgttatttgagtggcatcatggaaacaggcaagattgatacatatgctcagatatccatcatgaagcagaaaaactctgtttcgagttttagtaataaaacttgatttcttctaaggaatcagcatagtcgagtttacaaaactcatcatttttcttttgatttcagctttgaataacagtttcagaaatattaagtgttttgtcacatgtttgtacacgtatttctatatcttcataactatgcaaattcaatatttttccattttacagatgaaaaaataaatacttggaaagttttaattagtaagtgatttgaacaatgtaatgctttccaaaatcgtacttttccaaaggataaattgattcaaatataaaacactgaagacttcatagcataacttaaactactaagttttatggtttagtaatttcaatcaggactagttctatataataattcagtaataatttcttcattgctgatttcgaagaggacattaaatgtttgcactgattttggcagagattgtctctaaattcattaaatatttagtttttccacacacattattctattgaccatttttcttatccttttagagacaatgatcactacaatacattaataaatgtgtatatgcttataatatttatatctgtatcacagatataaggtgatatattggcaacaattatcttcatgatcttagtatcaactatacctatttctgtggcataagaattggttatactacaatatggtacaaccatatacctatatactacaaaattgatatatattacaataaacatttctggaaaactaaacaaaacagttaaatgataatattcatcaatagaaataaaacagagcatttttataactttaaatgcatgcttatctttttaacaactcatctgtggttatctaaaacttcaagaatccattgcgatgcacttctgcaggttgacattaataaccacagagctctgggagagaaacattgcttaggtttcttgaaatatgaaaatttttaaaattccagttcctcatttaaactagagaaaactgttagtgatgtgactaaaaactgtgttaattatgaaatgctaatgacatcatgtaagtgagttaaaaggattcttttaacatgctttaccattggtgttacttgttgtcactccaaataggtttgagatcaagaatgacccaggctagtttttatatttctttggtaactgccacttgccaaatcatggaatctggaattaagcttgaaactatttgcacgttctctaagaaaaaaaatggagtagacgaaaatatctttatcactcccaacacccaaatagttaactttttattttcaattgatatttcaactgtaacaattaaacatacacaggaaacatatcttaatttagttattaaatgtgactatatgttttctctgctttcttgtcatgttcagccattttcaaagccctttgtgtgggtatagctggtatttagaacatagggatattttttcctcctcccttcctccattccttccttcactcctctttcttttctttctttctctgcccccccctcaactttctctcaccttttccacccttgtgtactttctctccctctactttcctcccattattttttatttctggctgtcatcatttgattcttagacttaaggtataaattatacattaagagtgtaggtctatatgctaagtatatttgaggctaaggtaatcattttgcgtttatcacatttagtagcactttaagcatctaaactcttttattcttcccccctccttttctccattctgagttgctatttatgtgagtgcttatgcttgcatgtgttttttttctaattcacttactcagaattcttagtagtggtcaattatttcttcattttatcacctggttcttgaaggaagcagcctattctgaaaatgtttaaaagaaatgaaaatcaaaataaactgaaagtgaattcatggtataatttgactgatcagagtactatttgtcttattttcttaaagttcagattgttttctaattacatttttgtttttaatctgttttttaaaattctgacgaagtgatatatttctattcatttctagttacagccagaaactagagaaaaatgattttcagaaccaaaaatttctgctttatatttttgtggagacctttagggaggcatcttataccaacaaggatcaaacgttgaccaaaattgtggaacaaattgaattaatcttaatgaagactgaactaaacacaaatatttgaaccaccacttgaaaaaatacattcttgacaatgaatgtttatcttttatttgtgattatgaacatagttcatattgatgacataatatttctaaagtagagaaaaatataaaggaaagaaagagcaaccataacctcatcaccaagagatatttactacaacaattggatatactgcttttctatatatttttggtgcacatatatttgtatacaagtatacacatattttaaaacttgctgtgtatatagccaagcctttaaaaattattaatataattggttcaactggaagcaagctcgttttctaaaatcactaaaccagagaatcaaaatattctttgaactaaacaattatttcattttaaatcgatctattacagacacatttttcaaattcttaagtattcttctaaatagtctcattagttgtatcatatcattgtaattttaatcattaagggacaggagaaagattctcctgtgtgttttgttgttggaatcctaattttattcattaattttagaagctctttttaaaaaattgttatgaaatctactgttgaagaaagttttaaatttgctctgaagaaactattttaaatttgctgctgccaaactgttctaagatctcaaactaatgcaataacccttcttatggaaatagaacttaatagctgtagtgtgtgatccatttgagctgagcctctcaggagtaggtgtggattcaaggttgttaggtatgatttggagagccttttaaaataaaaatatacaaaattatattacacttggtgaaggtaataaaaaaatatttccacaagtacattgctagggctcctcccagtgtcttgaaaagagcccatgtaagtgagcagccctgaagcttagagctttcttcatattaaatttgccttgactcaggagttaacattagttttcatttcaaaagcatagttacattttacaaattacattactgaaaattgatttatagtttccgtggaaagaaatggtgagggcatggtggggagagccaggggctacactgaacatcctgcagccaagagtaagagaggggttatgtacctgaagtttcaggtgatggcctcatcagtgacatattaatagagaatgattggcaaatattcagaaatcagaaaaggcagtataagctggtagtgaaataagggggaagatctgaagcagaaatagaagtgcccatctcaggatttcagaaagtaatcagaaaggcctttcccagggaaatgcaggtgatattgttcatggctggtgctcactcctgaggtttgatgggtgggaggtccacttgggctcaaaggatcagacacggggtgcaatagacctacaatgtaacaatgaaccagaaatattctcagtttagctgggcattcttgagtgagacaactttccatcttctaaattgctgaagaagcaaaatttgaaatcagaaaatctgggtcttagatctcctgctaactcttaggagctgtgtaatcttcagcaagatttcaatctccccaaggttcagtttccttatttgtaaaataatgatattaagtatttttctggttgtctattgatatgtaacaaatcactcccaaatttagtggtttaaatgataacatgcatttttgtcatgattgtgtaatgtgagcagggctcagtggcatagcttgtctctgtgctactgagagttagctggggtggctcaaaggctgggggatggaatcatcatcatttgctgagtttgctcacaagcctccctggcagttgacactggccatctgctggaacctcagaatgtggctggaaggtctacacatggcctctctacgtggctgcttggcttcctcctagcatggtggctactttccaagggcaagtatccctaggtgtacaggaaaaacctgtagcaccttcatgacttagcttcagaagtcatccagatcacagtcacagacccactatcatttaaagggagggagcagggtctatgtctcaatggaggagttataattcacgttgtaggaagaacatgtggaaggggatatatccctggggccatctttagaaaatgcaatcctgctgctaagataataataggatatgtttatcaagagcatttaatatgtatcaagcgctaagagatttacatacatacatcacctcctttaatttatcaccaaacactctgaggtaggtactgcaattatcatctctatttttgagataagaaaaatgcagcatagggagtcttatttcaccaataatatatttaaggtgtggagttgagatttgaacccatggctctagagtttgtacttttaatccttcgcagcagttattttcaggatcaaacaagaacatatacataaaaatgctttgtgaattctaaatttgctatccaaatttaaatctttttaaaggaaaaactttgggaaactttttcagaaatattaatattttagatttcagacacacaatgaatgtgtgtctggttggctacaaaattaatataacaaataatattgtaatatttttggtgtttccagaggtaaacttctgagaatctttcgttttaaaagaattgtctatgatcattccactctctcatcccagcatccttggccatttccctaaaagtacagaccatcccttgcattttcattatgaaatcagagaatgttagttaaagctgtaaaaaccctaagattttacatgacccaactcgcttttgtattcctagagtctttagatgtggtttccagaagcttaaatgacttttgagaataaataatgatttcggtcacttttcctccctgatattttccggtacatgtaaaatttctagcagtttaactttacagccctaaagaatgactgacttggggtgaaaattttctttttaatttcttttggtggttaaatatttgaacattttattggaatttttcttttttcatctattaatatttaaccaaatagcaatatatgtgtagtacaggaaggagaatagaagataacattcccatgttcctacagcttgcattatatagaagcagcctccagaagcagtgactggtttcagagtagcaggcacttactatctaggatatatggccttcttcttgaagtgcagtgtttcattaaacaagacaaagaattcccgtgtgtgtgtgagtatgtttgcggcagggaaatcaattccaattataccacacaataccacattcttgtcctacgtgaagccttctataaagagttgtgggcaggaaaaagccagaacctccatggcaggtgttactgcagttcactgagaggctgcacagagcaacttgggaagatgacaaggacttgtggcctttgattcatcttgagctgaaccttaggctgagttcttagtgaagctaggccactctaaggctgtttgagatagaaggttgtgatttgatggcaactgcacattgttaaaggtcccaaactctagcctgggtctgttttgcgtggtcattattaggatctccctatggcagacacttctgcaacagaaagggcccaatttgatttctgaatgttgtgccagtcggggcttctctgactccccagggaattcaagttatcatctcagtatcatggtgtgtcctgagcctggactcctaaggctagagtcatagatgttcagattttttattttgtttttctatccagagcaaaaatatcactcagagcaccattttgcaactagacattcttggtggtcagactataaaatttcagatgtattggctttagaaaggcaattgtaggaaaaaaatgccagttgtcaatactcaacccaatgcttcattgtatatttaagatgattagtgtaattggaagtcatggggaattctaccaccatatagttttaactcacactgcaatggctgaagatcctgatacttcactaaaattttacttttattcccactgttgttttctgagactctagatttagttttctctttctttccctccctccctccctccctcccttccttccttccttctttctttctttcgtaagaaaaagacaaataattttgtgaagaattttatcagtcagtacacttatgagttttaacaattgtgtatttcctgaaagtaaataatgaaaataaatttcttaagaaaaataggtggaggatgttagatagttaagagaaagtgaatattgaacagttgagaattagctaactagttttattttatatttttaagttttaatgtttttatttaaagtaccatggtaggtaaagctcaatactgtgctaagatttaaagaaaactttatgatatgcttttctttcacctcagtgaactcaccgtttactatattttattaataataaatttattcagtatttccagaaggtaaaactccagagaatcttattatttttgtactaaaatttcactagtttcaccaagaagagtctgagaaaggagacacctaatttttgagaaatgcaatattaggaagcaaaaggttttatctgagtttaggctgtgacattgtagtgcaatagtaatgcaactgtaaggctagcccccctctcaagttccttctaatttctagaaggagataaatatatgcacgaaaatttatctaccatcatgagtcttcaaccttctttgttaagtaattcttcttagtgtagaattagcaccatcagcactactgatgatcacagatggaagttcttgccactttttgagtcaacctaacaatagtaaactgggagatccaggtatgttctctttcccccaaggcctacctcttctccctggagcaaagttactccataataactattaaaatattacattatgtttcaggagttagaataattaaacaatgtctacttctctaggtgctgatttactcagttaagacctaggcactaagaagacagcacacatttcattgattatgtcattgagcagtggctgatgatgaatttgtctgtactgtcctagaatgttgtaattctcaagtagaattttagactttttttcatttgctttatttcccgttttgtataaaattctgaatgacaacctagaattttttgtgtggcaatgtggtagaaaaggtgttatccccaaaattaggagccctgggtttcaatgtgatcttgggcagatttatttttctgcacctcagctgtaatgtgaagattatggataaaataatctctaagtctcttcaagttttaatattatatatgatatggtatatatataatatatataattttaataaaatgcagaaaatacacacatacacactgccacttgcagaggctctagaagggcagtgatacctccactcggacaaagagtttgtccagcagactaatcatatatttgctgactgaattggtcaacaattgcaggagagtgaatttattcatttaacagaagttattgaatggaaactttgtttaggcactgttctggacaaaggtgatacagacatgacccttatctttagaaagtgcacacaccagtgtggtatgcaggcatcaagcaaacaaccacacatccatggttatatatttatctatgtccaaccataagtgctgtaaagagaataaacggagtgtggtgaagaagccaagataggggccactttatataggatggccaaggaggacctctatgaggaagagacagagctgaaacctggatgatgaataggagtaagcctagcaaagccaaaggaaacaaatgagtgaagtctcccggcaaggaaagaacttgtcacatttgataatgaaaagaagtccaatgtggctgtaaaagtgaactcacagagcggaaagaagtaaggctggcaaaacagggatactggaagtcacatggaacatcttaagctataaaggagttttggactttatcctaagtgtcaggggaaaccactaaagagatctgagccagtaaataatttgatccaattatgtttaagatagctatgatttctaggttgagaatggatcggagaggaaaaacagtggatgtggtggggggggaccacattgaaggatatggcaatagtcaaggagcgagccaatgaagacttacattaaggtaagataatacagatagattcaacatatcattaagaagttgacagattataggtgagcaagtgtaaggaaataaaatgatttcattatgaatgggcatatggaatatatctaagttaacttccattaaagacaactttttcatgtatcacatgcacaggtgtgcatgtgtgtgtgggtgtgggtgtatttggaattgtcccacattttattgtgtattcctctcctcttgttttgttaactgaaaagatctgtaatttactcctattttagaatgggtccaggaaacagacatatgatgaaggtacagttttgatgaccttatttcctaatccttcagaatcaagacctactttaaaacctagtatagatttttttccctggggaagtctgtcttattcttaactgggtgtagatattctctcctctggtctgcacttcagcaccctgtacacagctacaatcattcctttgcaggtctcactcttccagaaagctatgaatttatctagtgcatgggatttcttccatttgtttgtctccaaaggcctagttctacctggcatgtacatgctggaaaacattgaacaacaaagagatcatattgattcataggatgtaatagttgtctttctatgtcctctggtgatagtgtgaaaactgaagactaaagagtggcttacctgagtttttcatttctgctatcatctctctgaaatgagtcagagacattggaggctatcatatggcaggcagtcatagagcttggcaaactgtccttggaagagctaaatcaacaatacctatgtggttcattaatttaaagcttttggaattggaaggagcctcagaggagatctagtcctacaactgactcactctgtactgcaacattacagccgaatttgtctaaaatgctggattcctaattttgggcttctcagaaataatgtctcttttcttagtttttattggtgaaaactaatgatgacttaatagcaaaaaggaaaattagacactaacacattctcattttttggctactaattaattaaattgcatttgtacacaaggacaggggaaaagatatggcatatagattaggggagatgacagaggatgatttccattctggttctttgtgaactattcctttctattttatttatgtatatctttaaccttcatattcttatgaaaactacctgtcttccttgcccatctttttccctctcaggagtcctcttgtcaaaatgtgctgtgaagattttaaataatggccattagaacttcccatcagagagtgtttgataatgatctaaggatgatcaaagcacctgggacccaactgcatgtggaattgacaaaatcaaccttttgtgcaatcctgtgctttgcagccctcacctccttggcaacatgacgcctcagctgcctgctgccttcagaaggatctgtggaaccaaagcacgttaggatatcagggctttaatgggttacctctcctaggatcatttttcttttcaggagcaagagaaaagtaatatcttgataatggtagaatttcttaggttagaagggcccctgccatcattttcgataacatcatatgtaagtcttatcctcaaaatcctggcctgtggagcagataagatgcccagtgacatttactggcttgtattcttggcacttcattgacttgggcttgcccagtgttccacacaggcacagtgtgtcacccctccctgtggtctacccgctatagatgcctactcatatgtctcattctcctgcagcatattgaataccactgtgggctctggagtctcactgcctgggctgtgttctcctctctcccatttactacatgtgggaacataaggaacctttctgagccccagttttattgtatgcaaaatggcatgttgtgggtttctgaagacaaggagataatgaatgtaaagggcttaatttggtacctaacacatagagctcattaaatgtttccaaaacaaataattacaaactctcatatggtactgtattagtccgttctcatgctgctagtaaagacatacacaagactaggtaatttataaaggaaagagttttaattcactcacagttcggggtggcttgggaggcctcaggaaacttacaatcatggcagaagaggaagcaaacatgtccttcttcacatggtgtcaggagagagtagtgcagagcaaaggggagaaaagccccttataaaaccgtcagatctcttgagaactcactcactattaaaagaacagcatggaccgggtgtggtggctcacatcggtaatcctagcactttgggaggccatggcgggtggatcatgaggtcagaatattgagaccatcctgactaccacagtgaaaccccgtctctactaaaaatacaaaaaatgtagctgggtgtggtggcaggcgcctgtagtcccagctactcgggaggctgaggcaggagaatggcgggaacccgggaggcagagcttgcagtgagccaagatggcaccactggactccagtctggatgacagagcgtgactccgtctcaaaaacaaaacaaaacaaaacaaaaagaacagcatggggggaccacccccatagtctaatcacctcccacgaggtccctccctcaacatatgatgattacaattcagattgcaacttaagataagatttgggtggggacacagagccagaccatatcagatacttactatatgataatatttgcatatatataaattatttaattcttaatgataaccctaagaggtggttactattatggccattttataggtgagggagccaaagcacaaggagattagctgacttacccaaagtctcatagctagtaaacagtagggagttagaatttgagcccaggactctctgctgccagagcgcctgcttatcaccattctgcaatgctatctctcctatagatggatgacatcactccaaaagtattggcaaagccattggaaaactcctctgcacaatctgaatccaagtgaaatgcaggtctgactaaggctctgtgatgtgaagtggtgtggaatgagcctttcctaccatgatgcagaaaacctgggctagacttacagacacatagtaagagatgtcggaggttactcagtgtaactccttcacttcacatataagaacactgtaacccagggcagtgcaagaacttgcacacagtcatagttacattgaggcagaaccaaccactggttaggtttccaagggcttttattttatttttaattttagtgggtgcatagtaagggtatatatttatggagtacataagatattttgaaagaggcatataatgcacagtaaccacatcagggtaaatggggtatccatcaccttaagcatttacccttcatgttacaaacaatccaattctactctttattttaaaatgtgcaattaaattattattaactgtaatcaccttgttatcaaatactggatctcattcattctttctatttttttatacccattaactatccccactttcccctcaccccccaactacccttcccagcctctgggaaccatccttctactcactatctctaagagttcaattgtttgaattttagctttcacaaataagtgacaacatgcaaaacttgtctttctgtgcttggcttatttcacttaagataatgacctccagttccattcatgttgttggaaatgagaatatatcattcttgttatggctgaacagtacttcattgtgtatatataccacattttctctatccatttgtctgttgatagacacttggattgcttgcaaatcttagtcatggtaaatagtactgaaataaacatggtagtgcagatatgtcttcaatataccgttttcttttcttttgggtctatacctagaagtgggatgctagaatatatggtagctcagtttttagttttttgaggagcctccaaactgctctccatagtgattgtactaatttacatccctaccaacagtgtatgagggttccctttccttcacatcctcaccagcatttgttattgcctgtcttttggaaaaagccattttaactggggtgagatctctttgtagttttgacttgaatttatctgataaccagtgatgttgaacaccttttcagatacctgtttactatttgtatgtcttcttttgagaactgtctattccgatcttttgctaattttttaaaaggactattagatttttttcctgtagagttgtatgagctccatatatattatggtgattaatcccttgtcagatgggtagtttgcaaatagagctgataaagaaattcagtaaagttgcaggatacaaatcaatatttaaagcattagtactatttatatatgccaacagcaaataatctgtcatgtgggttgtttcttcactttgttgattgttttctttgttgtacagaagctttttttttttttttttttttgagacagagccttgctctgtcacccaggctgaagtgcagttgcacaatctcagctcgctgcaattattgcctcctgggttcaagtgattctcctgcctcagcctcccaagtagctggtattacaggcatgcaccaccacacccggctaatttttgtatttttagtagagacagggtttcgccatgttgtccaggctgattttgaactcctgacctcaggtaatccacccgccttggcctcccaaagtgctgagattacaggcgtgagctaccatgcccggccgcagaagctttttaagttgatgtatcccattagttcatttttgcttcggttgcctattcttgtggagtatactgaagcaatctttgcccactccatatcctggagagtttcctcgatgttttattttagtagctttataatttgaggtcttagatttaactctttagtctattttggtttgattattgtatatggcacactggggtctagtttcattcttctgcatatggatacccagttttcctaatgccatttattgaagagactgtccattcccccattgtatggtcttggcatctttgttaaaaataagtttattgtagatatacagatttgtttctggattctctattctgttacattggtctatgtgtctgtttttataacagtatcatgctgttttgattactatattttgtagtgtattttgaagtcaggtaatgtgattcctcaattttttttccctcaggatagctttggctattctgggtcttatctggttccataaacattaggattgtgttttccatttttgtgaagaacattgttggtattttgatagggctcacattgaatttatagattgctttgggtatatgaacattttaacaacattaattctttcaattcataaacatataatatttttccattttttgtgtcctgctcaatttatttcatcagtgttttataattttcattggacagatttttcacttcttcggttaagttaatgcctaggtatttaatttcatttgtgactactataaatgggattactttttgatttctttttcagattatttactgttggcgtatataaatggtactaattttttaaatattgattttgtatcctgcaactttactgaatttctttatcagttctaatagtttttttgatgaagtctttagatttttttcaaatataggattgcatcatctgcaaacaaggataatttgacttcttccttttcaatttggatgccttttatatctttctcttgtctgattgctctagttaggactttcagtactatgttaaataacagtggtgcaagtgggcatccgtgttgtgttctagatcttaggggaaaagctttcagtttttccccatcagtatgatactagatgtgtgtcagttgcatatcgtttttattatgtagatgtatcgtccttctatactcagtttttgagatttttttattatgaagtgatgttgaatttcatcaaatgctttttcagcatcaagtgaagtgttccctcctcctctattttttgtaatagtttgagtaggatgggtattagttatttaaatgtttggtaaaattcagcagcaaagccatcagctcccaggctttagttttccgggaaacattttattacagttttgaccttcttacttgttattggcctgttcaggtttgggatttcttcctggttcaatcttggtgggttgtatgtgtctaggaatttatttatttcttctaggttgtccaattattggcatatagttgcttatagtaccttctaatgatcctttctaatctctgattttatttgagccttatctgcttttttttagtatgtctaaaggtttgtctatcttttcaaagaactaactttttattttattgatcctttgtattgtttcctttgttttaatttcatttatttctgctctgatcttcattatttattttcttctactaatttgcggtttgatttgctcttgttttctagttctttaagatgcatacttaggttgtttatttgaaatgttcttttttttttaatgtagacacttacagcgctaaaatttcctcttaatactgcttttgttgtatcccataggttttggtatgttgtgtttccactatcatttgtttcgagaaatttttcaattttcttcttaatttctttattgacccaccggtcattcaggagcatactgtttagtttccattttatatagttttcaaaattcctcttgagttctagttttatttcattatggtcaaagaagatactttttacaattacaattttttgaattatttaagatttgttttgtggtctaatatatggcctatccttgagaattatccatatgctgagaagaatatgtattctggagccattggataaaatgttctgtaaatatctattatgtctatttgatctatagtgcagattaagtttgatgtttctgtgttgattttctgtatggatgatctgtccaatgctgaaagtacagggttgaagtctctagttattattgtactggaatcaatctctctctttagctctaataacatttgctttatatatctgggtgctccagtgttgggtccatatatatttacaattgttatatcctcttggtgaattgaccactttattactatataatgatccttgtctctttttatagtttttgtcttgaaatctattttgtccaatatatctatttctgttcttttatgtcttccatttgcatggaatatagtttttcattcctttatttttagtctgtgtgtgtctttatgggtgaagtgtatttcttataggcaatagatcattgggtcttatttattttaatcctttcaatcattccatatcttttgattggagtgtttagtcgacttaacattcagtgttattactgacaactaaaaacctactcctgccattttgttatttgttttctggttgctttgttcccttcccttcccttcccttcccttcccttcccttcccttccctcccctcccctcccctcccttcccctgccctcccctccccttcccttcccttccctccgcttccctccgcttccctccgcttccctcccctcccctcacttcccctcctctcccctttgcttctttcctctcttctcctttcctctcctcttcttttctcctttctttctttattctttctttctttctttctttctttctttctttctttctttctttctttccttccttccttctttctccttccttccttccttccttctttcctgtctacattttagtgaaggtgatttttctctggtggtatattttaatttcttgctttttattttttgtatccgtattattattatgattattattattttttgagacaaagtctcacactgttgcccaggctggagtgcagtgcacgatctcagctcactgcaacctctgccacctgggctcaagtgattcttgtgccttaaccacccaagtagctggaattacaggcatgcaccaccataccaggctaatttttgtatttttactagagatggggtttccccatgattgccaggctggtcttgaattcatggcttcacatgatccacccacctcagcctcccaaaattctgggattataggcatgagccgccacacccagcctgttatatgttttttggtttgaggttaccatgaggcttccaaataatatcttataacccattattttaaacggatgaaaacttaacactgattgcaaaaacaaattaactaacaaacaagcaaagagaaaactaataaaaactctacgcttcaattttgtctgctttttaactttgttgaaaaagtttttaactttttttaacagaagtttaaaacctttttgactttttgttgtttctatttatatcttactgtatcatttatgttttggaaagttgtagttattaattttgattagttcatcttttagtctttctacctaagatgtgagtcgtttacacaccaccattacagtgctacaatattctatgtttttctgtgtacctactagtaccagtgagctttgcaccttcagatcgttttttattgctcattaattttgttttctctcagattgaagaactccctttagcatttcttgtaggacatgtctggtgttgatgaaatctctcaacttatgtttgtctgagaaagtttttattttttcttcatgggtgaaggatatgttcactgaatatattattattccagagtaaaagattttttttcgtcctgcattttaaatatgtcatgacactgtttcctggcttgtaatgtttccactgaaaagtctgctgccagacatactggaactccattgtctgttcttagtttttttttttttctcttgctgcttctaagattttttttttgtccttgaccttgggaatttgattattaaatgcctcgaagtagtcttctttgggttaaatctgcttggtattctataactttcttgtacttgaatgttaatatctttctcttggtttgggaagttctctgatattatcctgcgaagaaactttctacacatatctctttctccatctcctctttaaggccaaaaactcttagatttgtctttttgagactatattctagatcttctaggcatgcttcattgttttttatttgtttgtctcctctgaccatgtgttttcaaataatccgtcttcaagctaataaattctttcctctgcttgatcaattctgctattaagagactctgatgcattctttggcatgtcaattgtgtttttcaactcggatttctgcttgattctttttaattatttcaatcagtttgttaaatttgtctgataggattttgaatttctactctatgttaccctgaatttcagtgagtttcttcaaaacggctatttggaattctctgtccaaaaggtcacatatttctgtctctccaggactggttcctgatgccttatttagttcatttggtgaggttatgttttcctggatagtcttaacgcttgtggaattttgttggtggctggatattgaagagttagatattatagtcttcaaggtcttggcttatttgtccctgtctttcttaggaaggctttccaggtattcaaagggacttgggtgttgttatctaagtttttggtcattgcagccatgtctgcattagagggcacctcatgcccagtaacactgtagctcccgtataagtaccacctcatagaggtaccaccttggtcgtcttggataagatttggaagaattctctgattaccggtaagaaaccctttttatcttcccttactttctcccaaacaaatagagtctttctttctgtgctgagcttcctggagctgtgggagaggtgacacaagcactcctgtggccactaccactgcaactatgctgggtcagacctgaagctagcacagcagtgtggaactcacacaagacccactgtaactactacttggctactgcctatgtttgctgggctcacaattggtatgtgacaaaacaagtcaggctgtgtccttcccttcagggtgatgagttcccccaggcctgggtggatccagagatgccatctaggaggcaggacctggagtcagaaaacttagggatttaccttgttctgtagtctacaccagctgcgctggcactcaagccacaagacaaagtctttcccaccctaccctccctttccacaagcagaggcgtttctccgcatagaccaccaccacaggcctgcagacagtactgcgacgctactgcctatgttcactcaagccctacagcccttcagtcagcttgtggtgaatgctgtcaggcctgagacttaccctttcagggcagtgggctctcttctcacccagggaaggttgagaaattctacccaagaaccaaggcctggaatcggtaaccccacgagcctgcttggtactctaacccactgtggccaagctggtacttaggctgcaacacaatgtcctcttcacttttctctctgcttttctcaaagaaagtagtctcccatcatagctaccacagctgggaatgtgctgggtcacacccgaagccagcacatctcagtctcccccaaggcccatgatgtgcgctaccttgctagcactactgattattcagggcctaagagctctttagtcagcagataatgaatcctccaggactgggtccttcccttcaaggcaatgggttctccaagggcttttaaattcactacatttacttcaagaggtcctcacgttctttgaattaaaggaaacttttcttccataccctaatttccttttgaccctgggtaaaatctattttgacttagctaaatcttattttctactgatgatgtaaaagatatataaaatgtggggttaaataggaggagactgagagcttagtaatagggttgaattgatcccaccaagcataaggtggctaaaagtagctgcttggagggataggagaacagctggatcctgatgaatgtcagtccaatgatgctgggcagtatgtctttctgttagttcaggttcacctgatgagcttgttctggaagtggtctggttttgtcatatgttgggtgtttctgcagggcagtatcttgttccctgtttttcagtgactgcatacctaaaaatgaatattggcaaaaatgaatctgcaggcaagatacattttaagtggctgcacaacaaatgctttctcctcccctacagtaatacacttgtaaaagaaatcatattgggaaagaaaaaagctgttgaaaaaaatctgctaagcaggtacttactttgaatactgagaatatgaaaaatgttttgacatgaggctacagattatgaaagagtgctgattcatattgctctagaatcaccaaatgcttatgctataagaaaccttagagatttcctagtacaaaccctgtattttgaacatgaataaagaagacagaatgatacccagctcaaggtcatagctagttagaggcaatcaagactcctggctctcattctgaaaattttattgggaaatttcatattgtattagcctacttgggctaccaaacaaaattattacagactaggaggcttaaaccatagaaatttattttctcactgttatggagcctggggagttgaagatcaagtttccagcaaatttggtgtctggtgagagctctcttcctggcttgcagatgggtaccacttgctgtgccctcacaggttctcacatacttggtttctgctcataaagagtgtgagcactttggtgtctcttcttagaaggcttctaatcttattggatcagggccccacccttatgacattatttaaccttaattacctccttttaggcccaatctctaaatacagctacattggattttaaaacttcagcatatatattttgtttgggttatgatgggagtggaacttgtggctttatagaaagaagagagacttgagctaccacactcaacctcttcaccatgtgataccctgtgctgcctcaggactctgcagtgtccccactagcaacaaggctcttaccagacgatgcttctcaaccttgaacttctcagtatccatcattataagaaataaattacatttctttattaattactcagttttagatattttgttataagcaataaaaaacagactacaacagaaaattggcaccaggagtggggttgttgccaataatgaatacctgaaaatgtggaagtggctttagaactgggtaagagactggaagagtttagaggagcaggctagaaagatctgtgtctttatgaacagagcattaagagtgattctgatgagggcttagaagacaagaagatggggaaaatctgatactccttagaggttggtttagtgattatgaccagaatggtaatagaaacatagatcgtaaaggccattgtgttaaaatttacagtgaaactgaagaaaaaagtataggaaactggagtaaaggctatcctttttatagattggcaaggaatatggtagaactgtgttcatgcccaagggctttgtggaaagtccaacttaagagtaatgatctagaatatctgtcagaataaatttctaagcaaaacggaagaagctgcatggttgcttttggctgctaatcccgaaattcaggaaaaaaggaatgatttaaaaacaaaatacataattaaaagggaagcagaatgaaaatatttggaaaaccctcactttggcacataaagagtgaaaaagtatgttcagatgaagaaaccaagattgtagctcagcaaccatatggtgaagatattagcacagatagaaggaagctgcatgctactcctcaggacaatggaagaaagaccccaaaggtatttcagatatcttttaggctgtccccccatcacagccccagaagcctaggagagcagaatattcccaggggacaggcccaggactatctctatgagctagctgcccagggccacttcagaactctactctctgtccccaagcacactgcgcagctgctcaactatggctcaagtagccctaggtacagcttgcactgcagctctggtaaatataagttgtaaactttggtggcgtccacatggtgctaattctgcaggcttgtagaaagcaagagctgtggtggcttgacatcctccacctagattctacaggatgtcatggaaaggcaggagttaaggcagatacttgtcacagggatagaggcactgcagagatatcccactagaataataatgaacagaaatgttgggttggagcttctgcagagtactcactagggcaatgcccattggagccatgagagtgggactgccactgagatttcagaactatagagctaccagtgtgcagtgccagtctgggacagctaggtgtactgagcccagtcaaaccataggggcagggctgtcctaggtcttgggggcccaactcccctcactagtgtgcaaaggacactggacatatagttaaaggagattcttctgaagtcttaagatttaacgtctgctctcttgggtttcagactttcctaaggcctcttaacactttcttttggcttatttctttttggaatgtaaatatttgccctgtgcctatgtactaccattgtatcttttttttttttttttttttttttttttttttttttgagacgtggcgccatctcggttcactgcaagctctgcctcccgggttcacgtcattctcctgcctcagcctccctagtagctgggactacaggcaaccatcaccacacctggctaatttttgtatttttagtagagacgggatttcaccgtgttagccaagatggtgtccatctcctgacctcgtgatccacccacctctgcctcccaaagtgctgggattacaggcgtgagccaccgtgcccggcctactattgtatcttgaaattagataacctgctttgatttcacatgttcccagatgaaattctagactttggacttttgtgttggtgttggaatgaattaagactttggggtgatgggattggaatgaaggtatttgtgaaggacatgagttttggggaccgtggtggaatgttattgtttgaacatcccctctgaaactatgttgaaacttaatccccaatgtggtagtattgagaagtagagcattaagaggtgattagattaagagggactgccctcatgagtagattaagcctgagctagcatgttagcacatgagcacacacaaattactcaccatgtgatgccctgtgccaactctgggacactgaagtgagtctccaccggtaaagagactctcacaagatgctcaccatagaccttggacttcccagactccatactttaagaaataagttccttttctttataaattacccagtttctggtattattttataagcaacagaaaacagagtaatacagtcttcatatttgaccctccattgttaccacatggctgctacacctccaggctcaagtccatttactggctaaaaaaagaagagacaaaaggcttaagaagcagaccatctgccatctgactttttcaaaaatttcccagaagcttcacttgacaacttctgcttaaatctcattgcctggaactgggtcactttgcttctctagctacaagggcatctgggcaggtaggtgtttttggctatgcccggtcactccaaacaaaagtgagtattttttattaaagaagaacagaggaatagataatgtatagaaaactactggagtctgaaacatagaacgtgttgtaggtaaataattaagagccataggctttagagtcaggcacatctgaattcaaatcccagctccgacagtatctgggcaagttacgtaagttctctagtcctcagtttcctctgtaaatggagagaattatgacaaataaggcgacgaagttgtggtaaagatgaaagatgataattaagacataaggtctccataaatgctagtgttcacattataccaccgttttaggatcacaaggcatttgtgtttcttatcctccctggacaaagtcatactttaatttcttttaactttagtgagacagaatgttcagaataccaagacacagaagctgatgaaacaggttttattcagcattatttcctattaaaaataattattctctctgcttctagccctttgcctaaagagaagtcctctatgagccagccatcctgtgctcaagctgaagtgcttccttgtgttggagaagtggtgactaggcctgcagcctagcccttgtagggaatttacaacaaacagagagggggtcctgagtcctgtatattttttcttaaggcagaggctcatagatcaataaatctacatctcccaaactcagtctcattgagtcttcaacttaaaaaaagaaagaaagaaaaagaaaaaaagaagacaaatttcttctttagtaaattagggctctcacatcagatttcaggatttctatcaagaaatctgtatgtattacacatggtcttttaatctaagtatgtagatatcacagaaagtggcacatagcctatggccaactttacttaaaggcagtcactacaacattagtatttcttatttcctttgggaagaaaaattgttatgtgggcattatgagcggttcaattcccttctggaaaaatttcccaaataccctgtaatagctgtgcttggcatggcattcagttttcatccctatgtatttttatttcaaacttatttatattaacaaattaataaatgattattgtagataacttagaaacaaaaaatattaaaaatataaaaacacaattacatataattctatcgtctaaataaaactattgttaacatttttatacttgttctttaagctttatatatgtaaatgtattgatatatatttttaaaaattggatttatattttgcattctattttaaaccatgctgacatttaaaaatatgacataaatattttccctgacattgagtacaattttatatcatccttgaaaatgtttgcatgcattatttttataaatacataccaacctcctattgttggacacaaattgttttctgtttttattatttctaatatgtgctgtgataatttttgtgactgaaacttcgtggaaaatgaaattattttctgagtcaaaggatatgaacataatttaacatacttcatagtattgatattaatattacaaattttttaccaaaaagatgagaaaaatgtattacaccattaacatgaactcttgccaacagtggatattatcattaacaagtatatatagttttgtgtgagcgtgtgtttgtgtgtgtgtgtaatttggaggtaatttttctgaacttgttgttgctatatacaaccttcctgtttttgattatataccaataccacataggtaaggatagtggacaggtgagatagaattgctcctgtgaacctgtttcttgcacgtggaaaccacagtgggaaatgctgggtttttttccaagaatgatgatctccttttgtatttttataccacttagattttgccttctcttaacttctttctccatttcataaatagctaactgaagttagagaatcaatgaagtggatcattgtatgaagctctaaaatggatacagtgaggcatgagtgtttgtaacttaaagaagactcaatgacagaggctggatatagataaatgtagactttcaatacatctttaaacctaaacactaaaagccccaaaataaaaaagagaaggactttctttgtgcaagtgtggcagaaagtcatggacacaaggtgaccatgagtggacagtgaagcactgcagtaaagaaacaatcatgagcttgggttttataaatagcaacatgggcataaagctaaagctactgggtcagtgctaaagccttatgtccactttcagattctacagctgtagaaagacgtggagaatattccctgcacttttctttgttctgggaaatttaaagttattatcacatataatttaataatcatgatgagttttttggatgtgcattatgacctccattttacacaaaagggaccaaaacttagaaaagaaaatactttagggttatccagctctttactgaggatgcaggattcaaaccaggttgatttgcctttaagtctcatcctctcaatcatttagctgtaaggcacaatgggaacacgatgctgagaacacagtgaagcaagaggacaaagattacttggcctctatgctattacctaaagaaaacacccaatttgtagtaaatccccttcttctacttgggtgctatacttgtgcctgccaaagctggaacagaggtgaggctggaaaattgcttgtaagattcttttgttctctttgattgcccagtgtgaggcagctccttcactgaccttgaatataaatttccttatatgccaccacctgggaacaccgggacaggtgatgattcactcacctctgactgaccagacccatcatgctgactgtgttagaggactcagcagatgtttggatggaggcaggaaacccataacattttctaggtattaagtggcagagcagaaccaaacaaattaaaaggctgccaggaaaagtgaaagtaataggggttgtttctctgctggggaagagaaatctgaattatgacttccagaaggacaacctcccctctccccaaagaataatttaaaccagctgatatctgtctgcactgagaataaagaggaaacaaacaaatttagattttatcataagaaatttaggtaaaaaagaatttcctgatagttatagatgttgagtattacaatagttttccagaaggtgctgtgaaatcaattttattcacagaaattcttatttttgttttaccctttattactaatttaaaaaaattatttttatttttggatacataatagtttcccatatttatggggtacatgtgatattttgacacagtcatacaatgtgcaatgctcaaatctgggtacttgggatattcgtcacttcaaccattgatcatttctttgttaggaagattccaattttactcttccagttattttaaaatatacaataatttttgttaactatagtcaccctgtggtgctactaaatagtagatattcattttatctagctgtatttttgtattcattaaccaacccctctttatcttctctccccactaccactcccagcctcttctgaccatccttctactctatctccatgagatttaacttttagctcccacaaatgagtgagaatatgcaatacttgtttttgtatgcctggcttatttcagttaacataatgtcctccatttcaatccatgttgttgcaaatgacaggtttcactatttattggctgaataatattcctgtataaacacacacacgcgtgtgcgcgcacacacacacacacacacacacacacactacattttctctatccattcatcccagtgaaattatacttcaaatatgaaggagaaataaagactttccaagaaatattttttaaatgcgacattctcttgtttgtccaagatgtcataggaggcaaagtagttggttgacagggagtgatctgtgacccaagggaccagaccaggaatggattcatcatcacaggagaatgagagagactacatgaaataacccaggaattaagagtgtctagagtataagatagcagattctccaaaggaaaaccatttattttttagtgaaagtgtacaaacaaatatctacatattttctctatatgaatgtttcccctgatttactgatgtgtaaatatgcaggaatgagcaatgttgaatacagttgtttgaccaagaaagtgtttgaagatgcactgacaggatttgaactaagtgctacatgatggctgaaatgttacttgagccaccaaatggagctcagatggttttaaatatatcctcaatattttaggagtggaaaaaaaatcaatttaaagcctagttttcagtgcctacttttttgccatgatggcagttcgtacaggtgattatgaaatgcaacacaatctgtttcatgggtcaatgaaacttagccactaagtcactataaatcaatttttctgaatacatttccatttttccagttggataattatgtctgacttttcaaaatcataccgagtttagagaactcagagttgcagccattattttctctcctgagatcccattttacccccattttcagtgcctatcttaactttactctggtataaacaatcatgtccacttctattattttaaagtacttttatgattattcaaataataggatttctttgtaagctccatgtgttctccttcataaatatcccatcagttctgtctagaagttagttttagagcatatcttgatgtaacctaccctctgtaaatattgtcacataactaagataaaaattaagatttttcaacatattaaattgtgtatgttatggactttgtcagacgctgctcttccctttctcttgtactctctaggttttaggcaggatcttaacagtgataaagtctgttataaaatcttctacaatgcagcaacatatagcacattaccacgttgcaatcttgtaggggtatgccagaggcctcactaaagatcttgaaacagagtgtcattctgtaaatcatgaaccttctgctccagtggttcttctctacttactgcctctaaaaatacctcttatggattcacattcactcccattcaccctgaatgccaatgccttgcttggcatcaggcccactttccttcttacttttctgaagaggtgttctctgattatctctgctctcccatccttaaatctaggatgacggtagtttttatttttcatgtagcatatatggctcagtactgctgctgtattttgtgtgcttgtgtcatgccttcacacctatactgtaagtccatggaggaagcagtacaaaatggtggttatgagcaagaacttccaattaagatcctagatccaccactgtgtccctttgggtgagttacttaacttctttgagcttccacatcctcacttgtaaaagaggggttataacttctatatggagttattatgatgaataaatgaaatgcttaggtgtttatcccagtgccagacacatagtaaattttcatcaaattgaagggagagtcaatgtctaacatttcttggcaactcttaaagggcagagcacagggaatttttcaggttaagagttcaataaaatatttgctaatccaaagaaaatatgcagctctctaccagccctgagtgtttacaattacatagcctttttatttcttaagtgttttattataggtcacttttttatatattcacaactttctttcagagctacagatactagacacagagaattatctagataaattcttcaagccagcaaaagcaggaagaagcctaagtggcagaatgggattggggaaaggcagagggtgggctcgtggctgggtgtactatcttcagcctgacattgcttgctcatgacctggtagatagccaaagagcacatgtcccctagtttctttctctttatggagaatctgcttatattttaagactcagaacaagcgacactttctttagacagttttcctgattcttaacccatagcacctctattagatacttgcagttgtccttgtcatgtcattagttctgtttttagtaaatgaaagtaatagaatgttaagctcaatgggaggtggtttccttttcagtttgtatgctctttgcatctaacactgttgtcaataccatgagtataacagggttgttttgagaatcaactaagataatgtgtacaaatacaatttttaaagtaaagattgataaaaggacaagttctttctacattagtgctgcactcatgggaatttatatgtaagtttggagccttttaggtatcatgagagaaatggggagtttaaacatagtcaaatacgtaatactcagctgtctatcaatatgtgtagttaagaattgctgttcagatgagaacacgtggacatatgctggggaacagcacacactagggcctgtcatgggaagcggtgcagggagggagagcatctggaagaatagataatggatgctgggcttacaaggtgatgggttgatctgtgcagcaaaccaccaaggaaggtgtttacctatgtaacaaacctgcatatcctgcacatgcacccctgaacttaaaagttgaacagcaacaacaaaaagaattgttcaaacaagagcatataaataaagaaattgggacaaacatttcatgaaaccagttaactcatccagacattttagattatgaaacatacatgtttaattgctttttgctactaacagaaataagaagtaacctaagaatcaggacagagctgttccagttctcacatcaataagcttcgtgcccattggtgagatatttcacctctctgtgcctcagtttccttgtctataagctgatctgtttttctgagtatgcctaagggtctttattaggtttaaaacacaaggattttcttattctaatgcaaagagcattcttgttcgtttaacctgcatgtgttttcaaaaaggagcaaaatcttttctttattgaagtccaagggtgggcaccctgcaatttaaaatcattctccttgtaacacaatcttctgacaggccgacagtgacttctgctgagagggtctgctagtgatgtctatttaccttgcagattcctgaacctgcatgtattgtgagaaagtggcatctgacttccttcctcgcgccctcttctgcagatgaataagccattcgctggccagctgtgtgtggttttctcccttgtaatcagtcaatgcctgtcttttgagtcgtgacatgtttccacagtctttggagctgaggattttgtgatgtgttaatgcttcgtttgggcttcactggactgaattaggttactgaaggtgtttgaattaagagaaaaatgcattaatttgatcatttaatgttatgaaaaaggaaataagaaagcttcttttaaaaaatacaggaatgtcttattagatttaattacaatgctcatgaaacttttacagatgttgacattgaagtcccaagtcctttctgaatactgtcatatttttacaattatttgcttaaataattgctgcatttacctgatatttatcttaaaaaattttgaaaactactgccaaattgtgcaccaaaagttagaactgctttcacaaacagtgtatgtacttataccttgccaacactgaatattattaatctttgaacttctagcattctattaggtaaaaaaataatgtttcattttaaaggtactctattgatagcaaatactgttcagtgatttgtttcatatacctgttacccacttttacttattttgtttaaattgcttttgcttataacttttgcccatttttccattgggctgatacaacaaatgcacctttgctgtgcatttaagtatctggaactatcatgagtacatcattgaaaaagccataagaatattttctcgtggagattacattctaggggaaaaagaaaaataaagcaatcagtaatatgtacagcaatgcaccagtaatgacattttgggaaacagtgggccacccatatatgattgtggtcccacaatcataataagattataatatggtacttttactgtactttctctatgtttagatacacaaatacttaccactgtcttacagttgcctacagtattcagtacagtatcatgctgttcaggtttgtagcctagaagcaataggctattcgatataccataggtgtatagtaggttatgccatctatgtttgtggaaacacactataatgtttgtacaatgacaaaatcgcctaacaacacatttctcggaacatatccctgtggtaaagtgtcacatgactatattgagataaaagcatggggaatgaccaggatttacttagaggttgctttaagctaactgatcaggaaaggcttttcaaaggaggtgatatttctttcatgatatgactgataagatcacccagtagcagagcatcttttcaggtgatggaaatagcatgcatgagtttggggtattcccccaacagaaaaagataaaagcctcctgggatgaaccttccaatttctccaacttcatctcttctcactttccctccctcaccttctccagtcttatggagaagcccatgcacagcctggtagtccagggaaaggagtttccattttattccaaacatgttggaatgcaagtgtagctttctgtaaaggagtgacaaaatcagatttacactttaacagattactctggttgctaggtgtgaaatcaatcactgagaacaagaatggatgccgggaggccaatcaggagcctacggcacttgtctagggaagagctgatatttacttggtgtagaggatactatgctttgcccacccagatttcctttacctgctgtatgtgccagtctcctagctaccatgaaagtaggcttctatcggccaggcacagtgactcatgcctgtaatcccagcactttgggaggctgaggcaggttgatcatctgaggtcaggagttcaagaccagcctggccaatgtggtgaaaccctgtctctactaaaaatacaaaaattagccaggtgtggtggcacatacctgtagtcccagctgctcaggaggctgagacaggagaattacttgaacccaagaggcggaggttgcagtgagccaagatcgtgccactgcactccagcctgggcgaccaagagtgagactccggctcaaaagaaaaaaagaaagtaggcttctatcagtcccagttgccagcttcctgggaggcagtacctggtcttccttcttgtggaccttagccaatgattgactgacaaggggatcccttgcctggaggtggggttaactctctggtgtaatgtgctctagcactttattgtgttgtcagcctgaagctattctttagcttaaatgatgtttctgcttagctctttcctactgttcttccctgcttctctttgccttctcttcctcaataaattacttgaacaataatcttcatattaggctctgtttttaaataacctgacctaagacacagtttagagtggcagaggctgaaacagaggagagagaaaggattaagaatgttctagagataagggctacaggaatggtcctggaatgtgagaaaaagacagaaataaaagtagttctcaaattttgttattgcacaacttggtgggtaatggcatcatgtactaatagatgtctggaagaagtagatttgcaaggtagagaaggaaataattttatttcaaatatgttaaagtgtctataaatggataccatcaggtaggtaaataaaccaatcttttgatcccaagggcagttcagtctgaagatctatatttgggattcaacagggattcaaatatcatttgaatgcatgtgacagagtgggagtacctatggtgagagtatagatgaaaaagacaaaatttctcaggattgagtcctggtatgacaattggagcagagaaagaaaatccaacaaacatactgaggagtgaccagtgaagtgaggaaaacaggagaaggttgtatcacagaaataaagagaataaaatgtttccaggagggtatggccaactgttgaatgcaactgggtggttgatgaagacaacagatcacaagatatggaaacagggagattattgctgatcttgacaaaagaagattttgataagagaagattatgaggtaatgggtatgcctatgtccaaactcatcaagacgtatacattaaatgtgtacagtttttgtatatcaattagaagtcaactaagacaaagagaaaaaaatgctaaaaaggaaagaatagaagaagcaaatacattgacctaggcaactattgttgctataaacaggagcaatgaatgagtaactcaagagggacaatgaggtcaggggtatttttctttttgattgacactgataggaaggagaaattgattatccaagagagggaacaactgtaggagaaactccttgaatagacaaaaagtgatgggatctagtgtccgtgagcaggagttggctctaacctaaagtagacacacttcaaatttacaacagaaagattgatagataatataaatgccagtgaagaaatgtttatagatgttgtagtgggaggcaaagctagtttttggtagactgtttctatgttcttattgaaatatgaaatgacaaccaagccaaaatggggagtgggaatggttttggtagtttggaaatttgaagagagaagagtaaggatgaaatgattaatgaaatatttaatatttaatcattaatgaaataatttattccttctgtaagaaaatttacttacaggggtgatgtagtataatttccttgtgctattgaatatcatttttggtacatgtgctgatgaattttaaataaaaccattcagcaaggttgtgtcttttttagccatatttaggtgctcaggtgtagacatggaataggtagatggttgggtttaactagcattaatgtcaggaaaacataagagagttaaggaatttgcaagaagcaattaagaggtagactatgaaatctaagctgggctaagaaggaaacaagagggaggatggaaggaaaaaataggaaggttaatggatttgaaattttgatgaggttgaaaaagtgctgcagtagaggtagtagaatatatgagtttgtatgataagatgaggtagcagagatggatgtttgacatccacattcagaggtattagaaacatctgtgataacatggtcaaaagtgtgaccctggacatgtgtgggttacaggaaacatcagtggaaggggagagtttgagaaatcgtgagggcatggtatcagatgtatcatccacatacaagtgaaaatcctcaaacttcgggagaggaatagagacacagaggctcataaaatgggggctaaaatcatcagtggaatagagagacagggaacttgtaaagtgtaatatttatctcattgatttctatgagttttcagttttttgaagtgtattttattacaagaatgctataaaacaaaaatcaaaatataagacacaaacctctcataatcccatcactttgtcagaggatggtggattttgacaaagccctatagctgtttctggtctgctgatctctggcctggccaggtgttccatttattttgcttgctcattcttcgtggaaacgttgcaggactttatgttaccaagagtgtctgtctcttaacctggcagccagctgatgcaagtcctcaaataaacagagcttctcttcatgctcctttgacctccctagtccaatgcactgatctctcctacgtggttaaaatctgggacaagaactattaataatggttgtaaaatagggcagcaatccttcattttataaaacatgtctcattataggttccctagctcagatcgtctctcgttatttccacagagttgattgtctggttacatttgattactctctttaatccatccagatcttccgtcagtctcagccatatttacaaattatttggcaagtccgttctctccattcctgtgactaacaagttgttattccattgtgtaagtagtgttattgccacagttgtcttgaacatctgctgattgtttctggacagggaattatggggagagcggaatggacgctttcaaagagctggctgcccaggaaggcctctgtatcgcccattctgacaaaatctacagcaacgctggggagaagagctttgaccgactcttgcgcaaactccgagagaggcttcccaaggctagagtggtggtctgcttctgtgaaggcatgacagtgcgaggactcctgagcgccatgcggcgccttggcgtcgtgggcgagttctcactcattggaaggtaagtttctctctctctctctctctctctctctctctctctctcacacacacacatgcacacacacactttgaaacacatatgcttgctttcacaaaactagacttgctaactccaaagtgggagagatgtgcagtgctgagctgaacattagttctggatctcactgttaatgtgaatattggcatcttcctgctaaacaacagcagaacaaggctcaggagggaggattggttaagcccaggagtttgaggttacagtgagctatgattggtgccactgcattctagtcttggtgacagagtgagaccttaactataaaaaaaaaaaaaaaaaaaggaaagaaagaaaaacaagagcagagcagcatataacaagatactgatactttttcagaaaaaaaaaaaagatggaaagctgtttggcagaatatgtcttgatctggagaattattcgtttcacttgctttctccacacccaagccgatgcttatgtcttcctacctcctaaacatgaacatcttattgagatatcagtggataaaggacagcagtgaaaatggaaaatatgtattaagatttgaaatttacagagttggctaaagacaagtgaagatatgcaacggaactgtggaattttataatatatcatcttgtcacatttatgagatagctaattttgatgctttctgcatgtgatttctggaattgctggtggtggctcccaaaatttctgttctctttctaaatcacgtgtacttgtttggcaatagatggtcatcatcactggatttttcatagggcttttgacctaacagatatcttgtttaatttgccagcttctaatattgcataaataacctgctcagttttccccaggaacctactgagtttacctgatctttactgatcttcaaccctatcacactcatcttccgaagctctttgtctcttcccatctcttcttctgggtacactacaatcatatcacacccattaaagagcctcaaccactgatcttctgctctggaagctaggtagtactggtgtggacatgctcactggacctttcccttttgtccttgtgtttataataatgactgcaattctaggaacactaactttgccatcacctgaaattagaggtataagacacttgagggactttttaaaagaaaataggatagaaatacaaataaatgaataaagaaacagagatactctccaagcatgaggaggtgtggagccaaggtcaaattgtaattcatgattaagataattattaaatgtgggcaaaattggcacactggcacacagagtcaacttggcgtcttcaacatggtgcagtttttggaagccaataaaatgttcataagaaagcaggtcttctaaggagtatttaaataagaaatgttatttcttttaggagtgaaaagaaggtaagcagtattgttgaagtgttacacagagtaatatatgcaccaggacagagggtgtccagacattcaggcctttccattgctctgtaacatgactgcttttaggaaggttgcttgtttttaaaaaattctcatatttataatttacaaaacaacagtagtctgttttgcagaatttattccttttataatatcctcaaaaaagggttctggagatattgaaaagatgtggcaaacctgtgagcttcggggcatatagactacctaattatgaaacataattacacaaaattgtgcggtgtgtaattggagtgtgaaaaatgtatcctgtcaccattgtgagctggacaagaatgataatggcaacttaagtctttctagctcttttattttacctcctaataatgcaattgaactcatacaagtatttctgagagtcgcacatgtgtttgtttatgtgcttgtctatgaacaggtcagctacatgtgatgtctacctcttttattcctcttacctgccccacctctactggattccacatatccgagggagctattgtctcaatgaacacctgagcttctgaggacactgctttctgtgctaatagttacggtcactgatgcatggaatcattgagatgacaaagctataccatactctttgccaagtgaaggaaagtgtctctctgttcttctgggctactttccacgagtgtctatcaaaatggtgttggcgtttaatctcgaatcttagagaattttaatgaaagcagcctttaaaattttttggctcacaattttctctcccttccatgacattcagatatgagttcataaggagctgagctggggacagagccaagtagtgagacgatgccatccttagaagtagccttcccttcaggtggctgattccctctctttatcggggatggattctatcctaaatgctgctctgtcactcatgtcaatggacatgtgggcttggttccctcatgtcagcagacatgtccagaatagctacagtttaacctcaagctacaacttctagctacattagtaatgctgtcaaatatatctccctccctttctaagggattttatctaccaaatgttgaagttttttgagatcagaagccattgtttggtttctttcgtaacacacggtatgattctggctactgccagagtcacaagaagggcattgtgtaggtggtcatgaacttcttttcatatagtaaatcatggtgtagatagcagcaggagagatttggttaaaaaaaaattaggactttttaaatgaagacctacatgccctcgtctccatgtctgttactttctctcacacttcacatgcaatgtgtctggaactcgtcttgacactaccatcaaaacatattcagatgtggacaacttgtcaccacttcctctgctatcatcctggtccaagccacgatcattttcccttggcttattgtgataacctcagaatcggacctcttggccatctagtcttaacatagaaggcaaagtgatcttctaagaaattaagtcaagtagtgtcactcatcacctcacatgcctaatgccttaaaatgaccccctatttatttcataacaaagtcattacaaaggccttcaaagctccatatttgaccacttggaatgagctgctgagaatggaataatgaactatactgatagaaaaatggacttttaaaaaaggaagttctcatagagaataaaaatattatatattgaaaaaatgtggtggtaatgaaaaaacaaaacaaaacaaaacaaaacgtggactaagagttctagctatgccatgaagcaattatatgatcttatttacttagtagctttttgtcttggagcctatttttttctattaaaataaaatatttggctccacatcatctttaaacatttttccagtcctagaatttataatatattaagacaatatgactaatctaagatcagtagggatgtatttatagacttatctaatattattcattaatttgggctgatcaatttcttcaccagccacttcgttaaaaccagaattcatagaataagctggtcagtattaggataaatctgttgttatgaaatatagccagcagacccaggggagaatcaaacctttgactttgaataaattggcatagtattcttaccaagcaaattaactaatcacaatcaagttaatcattgtgcaaaagaatcatttcttcttgtctctatgaaagctttatttaagatgcttctcagaattatgctcactataataataattgtaataatgattgtgatgctgatgatgtacctgcgtctgataatacctgtttaggacttactatatataagcactgttctaagaactttgcacataactcatttaattgtcacaacaatgtgataagataggtactaatattattcccctttcaatgtacggagtacagtaacttgtcaaaaagtgctgcagtgccagtgctgggatttgaagttagggactgcaacatcagaatctgtgctgttaattagtaagtttgtggggtaatggaaaaacaaaacaaaacatgagataagagttctagatttaccatgattgttttgtttaagagatattggcattaatcttagtttccttttaacttgctctctctttcagagatttatttcacggtttagagtcaccttctttgggaaaatcagctaaagtatctcccatgagaaaattattttacatttctagttattctttatttctttgcattcttttatttcatgcttagttttaaatatttcctatgataattcattaacggataactcatttaacctcttttccagctcatttctttatcttaacatgggactttacaatgtcattctctttgcacaccaggctttatctatagaactatatttatgtagaagtcaacttggaatgagtgctatttctctaaaattctaagttataattattaaaattctaatagttaactgatggatctgttctaattcttaaatttttttttatctgaagaaagtaaaactgagaataatttatgtgtatgagcacaaaaaatagctaccatttattgagggtttggtaggtactaggctattaatatatgttgtctctagttccaaaaacagccctgaaaggttgacttgaaaagcagagaagttcaataattactccaaattcctaagtttaataagtggtggagtcaatattcaaacttactactgaaccatattatcatatacatatataggtattgaattgtaacctcctcaactgtaggaaccaagttttatacagttgtttattttccttcatgcctagcacagtgttttggtatgataactttttaataactacatcaaaaagcttgatagctagtagagagagcatgtagcctcattatgtgacccctgatttccctttgatagtctagaatcagtaaattttacctagtttggtaagggttgatgctcttcaatcagcctgtatctgaacaattcatctgtaaaattggaacaacaacccatttaggttgtcttatttgtctaatcacaaaatgcctgcttgcctggtgagtcatcactgggtctcactagtaggtcccttggcggtaccttagctccactaaagacacactattctttcagggtgagtgagagcctcctgactttagtcctttgcctagtgttggcattatcctgagcctccaccctggtttcctcatcttggaaagcctttactgtaagttcacattctgccttgttaggagtctttgactagacatactaggtgtaccatatttatttatatatttgctagccctttttactggattctgactacatctttttttttttacagttcttgcatttcaattgcttgtcccttactactgtgtgctgttttatctattgcttctcgcaactctgtgatcttctcactcattaggccaactttctatcactcctcactgcagagaaacaccacccccagccctttagctaaaacttgatccaagaaaattttattctcctgcttttttagttgaaacacaacaaacacatcaaacacacgtgtaaaaaatggttgaaatggagcaattgctttatttggaaagaagactacagtttcatttaaaagcaaatgaaatacttggtttttactgtgtaccttttggggtctttttctttcagaacacacatttgggaaagtgacctctatatccttgaaacataagattatataccacggtgttatgtttcatatactttttaaaaataaaatatgagttattttagtttcatgtttccactatggaaaaaaaatggggaaaactctaaagtttgcagcattcaggaaaaattgcaaagattttattttaaagagaatgtggactttcattgaagtgtgacatctccaaaaatggattataatcagaaggccagcaaggcagataagcattttctgatgcataatggtcatgacttacagatatatgacttggccttttctcagctcccaagggcaggaaattattacaaacctgcagacaggctatacttttcttaaaacactactgctctacagacagattaatgagagctttgtggaaaattacactgctagaaaaagactgagaaatgttgcttgggaaggagaaggaattttgtttagaatactctggagaataaatattatttgtaagatatcaacaggtatcgtgtgtatagatctctgatacagaattggtcaggatttccataacaactgaggaggttgatttaccttaaagttggtaattataaacccttcctatattctaacacctatagtctcatgtttcagataccggacatctgaaacgtgaaagattccactttcatggtctttacctgcctttagggtattaaaacattgaggaaaaggatttctggtgctgtctgcgtctgtatggcactacccaatttgaatagacggaaaaggatgtcattatgattcagctcattttgtctttgatgctgatcagagacaatatggaatttatcttaacatgttcttgtagcacttgtggcagttcctacctgggtttaaatcacaatcagcagacacacttaaaaatagattccctgatctcaccttagaccatcaatacaatttcttggtcaggactttggatcttatttctttttttattttccccgtctgatgaattagctttcagaatcactaccttatgatgcctagatcagggatttgcactcatgtggcattcactatgaattaactgcttatggggcatatttgaaagggaagacaaagtgaaaggttaactctattgtccattattctaccatttcagctctgtttttttctttcttgaaatttacttgccttcaaggtttttgtcttaaactacagatacatttgagattagtaaatagtagtcggagtagtaaaaaacaatttgcagttctctttatttcctgtgttggtgtcttctcctgctgcccaaattggcctactgacctgccctctgaaaacacagtcatgttccagttttctgactaatcaaattgcaaagtaggagcatttaaacataactcaaggttatgagtctagagttgcctggggcctaccaatgaagtttctcttgctaattaccagaatggggtctgatgactgaattgttccttaagttagactctctccataaccacttatctgtctacatcataaaactggggaggttttaaaaactttaggttttgggctccaccttcttcagattccagtttaatatgctggggaagggacttagtaatttatatgtgctcttcaaattagctttactaaattcaccaattttatgtgtttatttgatggattttgataactctacgcagtgacataagcaccaaagcaatcatgatgtagaatgcttgcacaatgtttcttagtaccgccttgcagtctctcctctgcaacccctggaaacaggcaaccacggcattacactttggctttttctagaatttcacatagaaggaatcatacagaatgtagtctcttgtgtctgatttctttcaattgacaaaatacttttgagattccttcatgctgttgggcatattactaatttcctctttattgttgagtaggattccatggcatagatatatctcaacttgcttatccatttacctattgatagacatttggattgtttctaatttgtaactattttgaatagtcctgctgtgaacattcttgtacaagtctttgtgtggacatgtattttcaattctctttaggaactatctaggggtgagattatgggtcataagtgtgtgtttaaccttgtcaattactgtataagaaattgactattttccaaagtggccatataattttgcagttccaccagcaatgtatgagagttctaattcctccacatcttcaccaaaatagtattgtcagtcttttgacttttagctattccagtgggtgtatcgtggcatctctttgtggttttaatttgcattttcctaatgactaataatgttgagcatttttatgtacttatctgacattttagtatcttttttggtgaaatatccttcacatctatgtccatttggattttcaggttgtttatcttctcattatggagtcgtaaaagttatttataatttctggacacaagtgatttatcgtatatgtgtataataaatattttctctcaatatgtgtctgaaatttgtattctgctgagtgtctttggaagatgaaacattttgaattttaacagtgtagttatcaatttcttcttttatggtttatattctttgtgttctatcaaaaatattttacctcctccaaggtcacaaacatttttctaaaagttttatattttttgccctcatattagatatatgactcatttgggcctaatttttgtatatgttgtgacataagggtgaatgttctttttatgtaagaatatcccagtcgtttgagaacattttactagaagaaatattatttcttcactaaattaacttgacattttgttaaaaataatgtaatatatgtgtgtgtgtattcttatcttagattaattgaatttttagcattcaattttatctctatttttggcttactagctatgacaattattttatgaatagttgatctagggtttaaaatatacttctttacgttgttattgcccatgtcccaagaatattatactgcatcacatatgatataagaagtttatgatagtaaatttctatttctccctgacttttgattctattgttattatgtattttatttctatatctattcttaaactcaaaatacattgttatttttgcttaaatagtgaattatctttcaagaaataaaaaatgagaaaaattagcttctatatttacccgtataaaaactatttatgaccttcttcattcctttgtattaatccatattttcatttggattattttttttctgcctaaagaatttcgtttaacatcacttgtgggacttatctactgagacacattttcttctactttttgttttgcctgcaaatgttttaattttgtcttaatgaaagaaaaatgcctagtatagaattctaggttgatagttgacttttatggtcaatactctagagatattacttaattatactttgacttgcatggtttctgatgagaaatctgctgtacttctttttacctttgtttctctaatatgtattatcactgaatgctcttaagcatgtttccttatcactagtattgagtcattttattatgataagccttgatgtagtttttaaatatttatgggacttggggcttattgaacgttttagattaagtgtgatcaaatttggaaaaatggccattatttcttcaaatattatttctgcctttgttgttatattctttctagctgagattccatttatatgtgtttgacttcttgacatttttacatagaaattttatctatttatttattttccacttttttcttttacattttcaacagtttctattgctataactttgagtacactgatcttttgttttgcaacatctaatctgccgttaatcccatcatgtaattttaaaatttcagatattgtatttttcatctctaaaagttatacctgagtattttgtttactttctatttcttttcttaacatggtcattcttctgggatatataaaaacatatttagagtagttgttttaatgtccttctctgtcttgccaggcaggctttccactgcagtttatggggtatgtgctgttctcagtgttgtgtaagttccaggatttgtttgttctatgttttccagtgagtctttctcccgccttagatattttcttctcagatatgtgtacatcagaacttagctaaagactggagggaatccctccaaagatttgtttttcaacccacttttctcctttttggtactctgtcccagtaagtctacctgcttcaaccttcccaaactctgatccctgttttcttatttttcgctgaatttcccccgccctgttctgcagcctagagactaccaccagacagtaacatgggcaatttggttcatctctttgattttacttttctggagaattatagtcctatattgacatttatacaatgtctgataacagttggttcatatattttatttcgtgttctagttgttgaaggcaggaggccaccatttcacattcctactagcaatgtatgaagcttccacatactaaccaaggcttgttatcattattgtcctttttatatagctatcttagtgagcataaaatgatatctcacgtggttttgatttgtctttctctaatgtttgtttatctgagaatgtctttatttcacctttaattttgaaaaatatttttgctggatataagattcttggctaacaacttttttttccctccagcatggtgaatatgtcattcaactgtcttttggcctcttttgtttttcataagggattacttctgtatattactgtggttttctttttatatgatcagtggtttttcacttgctgttttcaagatttttctgtttaatcccatgtaaccatttttactatgctgagccttaatcttcttgtgtttatcttacttagagttcattcttgcatatgtagataaaagatttttcagcaaatttggaaagttttcaaccattattgctttaaatattttttcttctcctttatctttctccactttttctggtactctttttatatgtatgttggtacactcacttaaaggtatctcacatttctctgaggctccgttcatttttgtttttattgttgttctattttctgtctgttctttgggttttgtaatcgttattgattcactcaatatttcttctgccagttcaaacctacagttgagcccttctaataaactgttcattttctttatcttttcaactccagaattaattttggtccttgttttttaataacttctgccttttaattgatagtctgtatttaattagacactgtcattatatccttttttttacttctttaagcatagtttccttagttctttgaatatatttataatagatacttttaagactttgttatagctgacatctggtccatctcacaggcagtttttggttgcctgctttttttttgcatgtatgtgagtcacacttttttttaaaaaaatctcatttttggttaaaaactggaaattttgttaatatgttataacaattccagatactaatcctgttcctcttctctggggcttgattttgttattgtttatattttttgtcttgggtagattattttattgaagtctatttttttgcagtgtgaaatcacttgaataatcttttttgaatttgtgctgtgtactgggggcattttatatatgagaaaaccatggctcactgagatttgatgacttatccagagccacttacctagtcactacagcaaagatattcaaataaaaatttgtctagcttaagagtactctcctgtgtaagtagggtaccatgttgaaggttgcagaggaagtatgtatttattttctgttttctactataataaattaccacaacgttaatgacttaaaaatacaaaattttaatattgagttctgggccctcacgtgccaaaaaccacctggtgtggcaactgcacgccactctgcatcctacagcgtggatcctctgcatgtgcttttgggagatgagctcactgaaatggccatgtccagtcaaggacactttgagggaaattttgagtctctggatcttgcagaatttgctcaaaatcagccatgggggaataagatgtttggacaggaatctggatctctggctaaaaagtatcccgtgacaacccagctgttaattggaagcttcactagatgatgcatggagttcatattccaaaaggttgaaaattggctgcaacagctgtgggggggtgaattttttctccttcagcttgcaagtcatactgagtacatcaaagatgactggcaacaactagaggaggacatgaagaaagcaaaagaacagctgaagatccataaaagcaatcagatacctactaaggtcaagagcaaagctgaggaggtggtgtcatttgtgaagaagaatgttctaatgactggggaaattttcagaggtcttctgcttggcatggcatcataaggaggatgacctcatttctattgttcttgttttttttccagccaccagcctctatactccatcatagggcatagagccctgcctcttcttttcccatgacttcctccctgctgtggcaaatccaaatggctttgggaagcatctgttggtataagttaatatggtcctaccttgagcttgatggtggcagaagagacaatagatattagttctccttccagtcactattaaagatatgctttactcagaaaaaaaaagacaaaaaagctctggatgccaaaagtttgaaatgagtgtcactgggctaaaattaagatattggcgtgccttttctacgttccttggattgtagaactctgcctacattccttggatcacagccttcttcctctattttcaagccagtagcattgggctgagtcttcctcacactgccatctcccttgttctctcttctgtttccctctgctactgttaataagcattgtatttacattgggcacacctgtataactcaggacattctccctaatttcagaccaggtgaatagaaacctttattttatctaccaccttaatttctctttgccgaatgtattcactggttccagagatttgagcatggacatctttgactggctattattttgagcagaaggtcaaagagaggacaggtattagtagtctgtggaaaaagcagtatctaggaaatatttggtagaggagtgagggagccttaagagattggtagattgagggaagaacttgataaaaagtaagaatcttaaagctatatgaggtgagggatagccaagaaaggtcttagcacagtgatactcaatgtggggttgggatgagggcactatatttccacaaggcagcatatgagtcttagagggtaggttagtggtctgaaattaaaacagtattttttatagtcctagaatttgtttttgtcatatttaatggcatttggatttaaaaaattgaaaaatgtataacactttatacttttcacagaaagagataggttttggaagagtagagaaatactaactgataagttgatcagggagataggatcagaaataaatacgtaaggctggattttgaaaagagaggcgacatttcttcctctgacccaggagagtgagcgaatgactggctgggtaaaagtctggatggactttggtaataaacggattcagaagcaggtgtgctgcagtatgcaagttctttgactggaaaactcttgattttggcctgatgcagcaactcacgcctgtaattccagcactctgggagcccaagtgggtggatcacctgaggtcaggagttcaggaccagccagaccaacatggagaaaccccgtctctactaaaaataaaaaaaaatagctgggcatggtggcgcctgcctgtaatcccagctactcaggaggctgaggcaggagaatcacttgaacccggaaggcagaggttgcagtgagccgagactgcaccattccactcagcctgggcaacaagagtgaaactctgtctcaaaaaaaaaagaaaagaaaagaaaaaaaaaaagaaaaagaaaaagaaagaaagaaagaaaagaaaaaaagaaactcttgattcttccaatcctatcatatcccatctctttttgtgaataaactgattttgatgaatagtaaaataattaagagccactgccttaatcattctagacagtaaaaataaataacttctctcactgatggatgattccagagttttatctaaattctgtggaatggttgaaaattgcagaataatttttttcctgaggttctttttttttttttttcgagacagagtctcgccctgttgcccaggctggagtgcaatggcatgatcttggctgactgcaatctccacctcctgggttgaagtgattctcctgcctcagcctcccaagtagctgggattacaggcacccgccaccacgcctggctaattttttgtatctttagtagagatggggttggccaaactggtctcaaactcctgaccttgtgatccgcccgccttcgcttcccaaagtgctaggattacaggtgtgagccaccgcacctggctcttccttgaggttcttactcagagttgtagtttcagttatgtttatgtcaggtgtgctcacatatttggaagaatatgaatccttacttgatatctgacatcttatctctaagagataaattttatctctaagagataaaaatttctatacatttttaagacaacattgaaagttgaaaaaaatcatgtcctgaaaattcagtttgagaaatttttactcttttttcctagtgttaaattttccctacacaggtatattccctggaaattgctataggcatttttttttccaaaaggtagacacagcttcagggatgtgtggaaacactacacaataactactggatatgactttatgggcttctggatttagcattcctttctaatagagaaatatgaatattattttttctccttgctcatcaaatatagcacattatatagttcttaaattttactctagtccatgcctgtggggatttcaaacctagataagtgcaaaggagctggaattgcaaaaattgtgtcagtaaagaggtatactgtgtgtagtttgctggtatgttttgccaaagtagaatattgaaaattattatatctatgtactgagtttggtcactacatactattggaaaattttatattgttatacaatcacttaattaagcttataatttccgaaagataaacaagagctcattaactatgttttgggttattagattaggaatgtttacacttgtatccccagggctttgtgccttgaattttctttaaagagaggaaagtcttggctgaggctgactttctgtggagaaagacttgtgaaatgcaaatggttttcatccatccaaaatctcattatctcaaggctcaatttgggaaaaacttgcttccaaactcattcactttgccattgccatggctcagattcttgctggctatttgttggagctaacagtttcttgccatgtggacctctgtgtggggccagcccaggtgagatctggcttccctgaggtggggggcggatagagagagagagatcgagagagagaggggagaacatcacagtctttggtaactaattgtggaagtgatatcctgttacttttgccatattctattcattagaagtaagtcactaggtccagcaattcaaggggaggggaatgcacaagggaatgaacacaaggaggcaggatcatcttagaggctgcctattatggtggtagaaacagacccatagtatttgcatttggaaatcactttttctgattaaatatgcttggctgttagtcattttatagtcttgcttttaaagctattattctaatgaggttaaagcagaaatcagaatgaaaatttttcaatgacaccattggaggacatacgtccctgtgctagtgttatcacttgagttttcgagacttataatagattcttgttacaacctctactttccttaaatgtcatctattttaaaagcttcaggtaaagcctctcacaagttgtctggacatgtctatatagatggtgtttctttgctgggtttattgtgttttccatgtgactttgaggagcagtctatgaaaaacaggagtattttgctctacagaagttagtttttccttcaaaattgtaaatagtaagaataatacaatacacataaatacaaatgcaggatccatctcataaatccaaaatatcctcctctgggtcattggaagtttttctttttaaagtcacaaactggagttttcaggtcttcatgcacaattcatatggtaaggaaaaaaaaaagatgtatatgctataccttactagccagatgagaaaggcccaccatcttccctatagttgatagggtatgggttacattaggttataaaaatatataggttgtatttcacagagcttacaataatactcgggttgtctaaacctgtatgttataataggccattgtggttttggggaaacctctaaccctctttcctcactttaaaagagagacaaaaattcactaactatagtaactatctcctaagttattctgaagattaaataataaaatataatcatgataagggcacagttttgtttagctagcttttgaaaccctagcgccctttcaacagtgctttaggcttcataggtattcagttaattcttaatatcaaataatgtgtccagttcagtacctgatacacaatgaattctcagtaaatgttgacaattgtgattattcaacaataaaatagatttctctaggtgtcagcaaggatcctttaactggcaatagtcaagcagaggttttgaaacacctattaggaactggaagggattaataaattaggaaatttattgatgtacttgactttaagtcatgatgtgttataattgctgtttcagaattgttgggttaatatcttacctgtttttgaggattacagtgaatagctgtaatttgaatatctccccatgagcttctctggtcaattgaggtaaggaaatcagtaataaagactcagagatcttaacatactaaaattttggttttagtgtgttgacttgttcaagagttcacttgttcaagagtttagtatgttcaagagttcacttggctctgtctcctgtagaatcaacagctcaaaatatttgaaaggaaaaaagaagtctgtaagttttccttcaagatatattaaatattgtatattttctaagcaacaatgaagttgtactattctataccaaaataattagttgattcaataagttcttagaagaggattaaatcttttaacgaggttacttctctaaataagcaataaattacatcagataattactcatagaataatttttaactagcatccataatagaaatacctgcattctaactccagattccccattcattactaagagaacttgagtaagttacttaacctttctctaaagtgataccaatattaacatctctcatattagggctattgcgacctttatgaagaaaatggaatttaactgtttaacagaattcccctgcatgccattagaccaatatatattagctacacattttagccttgtattactaaatggactcagcctgagctttcttttcttctttaagccttaagtatttggcttcaagtttgtatctcattttcctaacagaggaccaggaaagaaagcagcaaagtaaagtaagtgagtcctttatgtctgacctttagtccattgtttcaatatatgatttcctaatctcaacccaggggaataactagaactgacatgtattcccagagtgacttcctctgacaactcacagcaggctagaatagaatagaataggctgagttaaaaattttagattatcttcattctctttctgctagatgtgttctgaaaatagtttgtacaagttaagtttcacttctttcctctaggatattattaaaggtgtctttcttttaatttggctctctttgattttttatatagcttaatatatgtattttttatactcaatgttcttaaattcctggcattcagtttcagagcttttaatcacactaaaatctgatattcacgtttgcaactttttgaagctggataacttatgagtactgttttggaaaaaaatgaattgcattcctttctcagttatcattatttaaatggcatctctgccttcactgaattttttttcttttgctgttgctctcattaaatgcatttttgcaatttgagtttgaccatttcttgtctctgccttgaaaaatgcattttaaaattgtagacaagaaaaatgcctgtgaaagatcacaatctcatagtcatataagcacttgctcatcataggtctgcagagattatttttataacaggcctacagaactctttattctgtgtattaatttgataaattttactttttagatgaattttactattcttggatttacagaaaaactgctaagataggtcaagaaagttcccctatactcagcactcaatttcccttagtaagctttattaacatattttattagtagagtacatttgttacaattaatgaatcaatattgatactgcattataacaaaagtctatgttttccgcagatcatagtttttacttactgtccattttctgtttcagaataccacattctctttagttgtcatgtctccttagactccttttgggtatgacagtttctcagactttccttgctttgatgacctcaatagttttgaggagtactggtctggtagtttgtagaatgtctctcatctagcacttgtctaatgttttttctcattagtagactggtgttatggatttgggggattaagaccacagaggtaaagtgccattttcatcatattatataggttgagtatcccttagctgaaatgctttgggattttgaatgtctttttgatttgggaatattttttctaaacacaatgaaatatcttggggatgggacccaagtctaaacatggaaattaatttatgtttcatatacaacttatacacatagcatgaaggtaatttcatacaatatttttaataattttgtgcatgaaacaaagtttgtgtacattgaactatcagaaagcaaaggtgtcactatctcatgtcttctgcgctcaataagttttaggttttgggacattttggattttggattaggaatgctcagcttctatcaacatgacttatccctgctgatattgatgttgagcatctaatttttatgtattttttaaaatttctcatttagtagccattcttatttggataccaaatgtctatgcttgtatattcatgtttgggactatctgccctagaccaacttgtgtactgttcattatgtacatcacccactggctggcactgctaaggtgaagctgggttaggaacatccctgtgatttaattcaaagatgttaatctacccacaacaaggcctctaatctgggctggtggtataagaatgggaatcgattttaatgccttggaagagagtcctgtgagaaatagacagtggtcagaacccagacatatggactttttgtcctggaagtaatccattttcagataggaaatacagagtaccagactataaaccactggcgaatctcaaatatacaaattgggagaaaagggtatattgaagaaaataaatcaacactctcacgtgcacatgtgttctcaggactaacactgactagtgcaatccagacctaaacagcaagattcctttcagatcccactacctaaaatgccatgcccccgctggaaaagataaagttttacttcatcttgactttatcttgattttgagcttgcagagagatgaccttatgaccccagccagctaagcctttggagaaggaatgggtgggtatcagtgtagggtcaattgattgaactttctgctcattcatttatatgagagaaaattaaaggacagtgtgcctgttgtttagattgtagagtcagtaagtagcatgcccagaattagaactcagaactttttttgttttgttttgttctgagacggagtttcgctttgtcgcccaggcgggagtgcagtggtgcgatcttggctcactgcaagctccgtctcccgggttcacgccattctcctgcctcagcctcccaagaagctgggactacaggtgccggccaccatgcccagctaatttattttttgtatttttagtagacggggtttcactgtgttagccaggatagtctcgatctcctgaccttgtgatccgcccacctcggcctcccaaagtgctgggattacaggcgtgagccaccctgcccagcccagaactcagaacctttaatttttttttgttctttattccttcatcttttaagagtttgaaaaactcttcttttcccagcactttgggaggccgaggcaggaggattgcttgagtccaggagttcaagaccagcctgggcaacacagggatactttgtctccacaaaaaaatgtaagaaaaaaattaactggagtatggtggtgtgcacctgtggccccagctactagggaagctgaggagatttgcttgaacctgggaggtcaagactgaagtgagccatgatcacctaggtgacagagcaaaatcccaactcaccaaaaaacaaaccaaaaaaaccaaccaaccaacaaacaaaaaactcttcttaaaagattatctgtatttttctatcatttcttaactttaagtttattttatgcagatattaacttcttttaatattatagaccaaaccatataagagatttgctagattttgttgctgctagtgttaggtaccatattttccaattaaagatagtttattttcactgacaatatgaagtaaaactaagatttggtttatttctattgtttatgcaagaggaaaagttatcttaactgatttttacataatgaggttatacttagatgattatctcttttaaaagcagaggaactttttttttcatctttacaagttagagctcttggaggaataaatgtgaaatatatattgtgtggagtgatcgttgatgaaattccttcctgattattctatttaagaaagaactaaaccttttcttctctttgtcatataggttttgcaaccttgatcatttttcttttttctttttttttctaaatccaaagggattgtaacaaccaaatgtcacgaacttaaactttactaaaattggttttcttcataggactttcattagcttctcatggtttactctttccaacccacagcctggttttacttttaacacactgcactttaggtttaaaatgttctaataaaatagtgcttctctaatatgtgactttaagcaaagtcgactcttgaataagaactcacttacagcaaatatttttaaaagcggacctttctggttagctctaggtataatggcaggagatataatcttagtataactagaaataacctcaatgtgataacacacttaaaacccataggattatgaaacgtataattataagagaaattctgctgaggagaatttgtgccaaagaagagatgacactattttcactgcccatcaactgaggataattggcaataacacacctcaggtacataaatagatttgcagtgcccatggataacatgcatttcagcaagagactgctgtgaatacgaaatgaacttggaaagaggctaggaaacttgaaatgttcacacataacttgccacctttaaaaaaaaaacaaaaaaaaccacaacaaaaatccacaaattctccaaagagtaatggtgagaaatgaaatgtctgaggcactgaataaggaagtctttgtgataacttcagttcactaaataaaatatgtcctatgccaccatcctaggatatgaacatattcaagattaggaagaaaactcaaaataactttcaatcttcaagtgagaaaagaacatttcaaaaagaagatcaaggtccttaactccttattgtattgaatataagttcactctgccatgattactgttgtattttgaatatacctacagcacttgatctataattgtcacttaatatattttgttgaatgacttcagaaggaaaatattgatagagaactgaattatggcataatgttagaaattcataggttgatccaaaatattattatagctcaagctgtcaatttctcctttctttcgaataactagcaagtagggtacttttgtctccttgtcgtttgtcaatgtactaaggactaagtgcctgagtctattactaggtaagaaagagaggtgaataaatatgggatcagaatgattaacaatgaaaatcaattagtaatcatttttcaataagatttattaattataagcaggatgaaagcaatatagttaataagagcatacaaaagattattcttggaacacacagcagtggaattttagggatgtaaaataagagatcattaaaaaggaaaagcaattgagaaagggtagttattttattaataaaaaagttgtgaaaggttatgtcaaacatttccacagcttacctaagaagttcttgttttactgaaagtaaaggaaatggattggacataacatgaaaattattggcctattttgttaaccttttcatccacatctcatgtacacagaatatagcttaaaaattattttgtggtgcactgtaagcttttacaacacagggtctgcaaacagatttatttcattaataagaaggaaagacaagaagcttgattagtagattgttttttcctctagcaaattgtttctctttgaaatacattgtctagagttatttttagtagaattctaaacgacaggtggatgaaactttttcttttttgaatttgtcttgattgcaagaaattatctaatttcatccctcagttccccccaagtcagttacagctgtacatgcagtgctatctgaattggaaatatacttcaaaactcattcatttgcatgtctattaggagaacaggcaaaattctaatgacaacaattacttgccctttcctgatgctctttaaataaagtactttgcaaactgtacataaatttgccttaaaatgttatattacccatacatagtacattctcacaaagacttcttaggttggataaatggagtgctacctccatcactgcagatttgaatacaagttattgttgtattttttttctggagtggaatgagatgcagtaatttacaacatgaaacaagacatacatactggggttaagtcaataaaacattccactcatgttttctttgaatagagacactagccaaagatcaaatatcctagataaactgagtattaatattttctcataaaattagtaacagaaatacctgctttgtcaggtatttgttgaatttgttcaatttgtcaggtattctatgaatttgttcttaattcatagaattagggtatgaatttagttactacagtagaaatgaaactaaagtaacaatctggaggcaggcagttaagggctggtaggacagctctacctcatgaggtcttctaagattcaggctccttcacatttgtcattccatcatcctctctggagttgttctcatctgcagggttcaagatggcttaccatatcatctatcgtctagtcactggaaagagaaaaggagacaagtggagacctccttcctttaaaagaaggacatgaaagttctacatattcatcacttctcttcacatcctgttgacaagaactttgttataacatgccacatttagctccatgagagattgaagagtttattctttcttttggttgtccatgtgcccaactaggaactcttatatgttaaataattctcctattatttaacaataggagaataaattttgggagacaactgtcattttctgttccacttcccagctcttaggattgtggtgagggtcaaataaagtgacggaggtagaggagatatattaactgataacacagtaaagtaaaaatggtagttactagtcctgaaatcagctactaggacctgggtgggaacacagctctgaattttagtttctatctataaaaagacggccagaatagatgatctctatgttccttttccatgccttgtattatgatcttaaagttctttgtgtctttcttaagtaactgtgcgattctcctctagaaccttcgtgtataggctgattgcttggttttatgttgtctaattcaggtacatttctctccttcatcagtttctgctccttagtctgactcctaatgttggtggttccaatatctaccctgacttctatctcttgcatatggcataaatcctcatatttttctaagttctttgtgcagtttctgtaaagataggaacacagctgaaaacaggaagatgtatctcaggaactacagcaataatcaggccacttagtctgtaaatcacacttggagtgggcaattaactaggtctcctccccactgagaaccctgaagcattgtaaaatgtaggacctggaacactgctggatttagccaggaattcaatatttaaatgggtcacctcggacatataatagcacttgccagatgataaaaaaaggtttaacagtatgatcataaatcttgggtccagcctgggcacttggtttttccctaacttgttttaaatcagtttgaaaaagacagagggggagataattatgatcacagaatctttgaatcagaagaaaatataaaggtcatttcacttaatttccctccagaagaagcactctctctccaacttcccaaacatgtttattctatttttgcttgattggaaactcactgccttctgagacaatccattgttctattgtttacaatactgataaattctctaattgtggctgataagttttttctgtttttttttaattaactatctgtggattatctgaatgggcctcatggactgctgtgataatatactaaattttattctccttgaatcagagtttcgttacttaacactaaaatgccggcatgaattcagtaccattaactaaatttttattgagtcctgtggtaagcaaagcacagatttcctatacctctctatcttgtattagtctgataggctatgctatgctgcaataaaaaacaatcttaacattctagaaacttaaatcgataaacatttatttatttttcatgttatatatcatctcaggtgtgtggggctctgcttcatctcatcctcatgcagggatgtagcctgatgaagccttcatgatcaacaagattgctctttaacatagagacaggaaaggaatgtgtcagagtatttcccttaaaaatgtttaccttgaaaagactacatagtttccactcacatttccctggataaactttattttatggaaaggaaatgaaatagtaccatgtgtgctgaaaggtggagaaccagaaatattcattctccagtaaaatgttagtaacaaacatgtaatatctggtcaacaaaaggtcagcttatttttatttccatgcgcacaatacattaacctctttaaaaaggaggtaacccaaaagtaccactgagtgacagcacaaatcttctaaatcatgacatctggatgatatgcagtagccttaataccaggtctgaatataaccctttttgatctgaacacatatgaattaaaaatgtacattaacttcctctcacagtccaatatacgctgaccaaagtagaataggataatttgaataaacattccactttggaaaaagaataataaaagaacatggggctagtctggcctagagcaattgtgctgtgccatacagccaagactgtgaaagctgcctaccttgaggttgagaaatattccttgcacagaccctgatttggctacctgggagtagctcccttgtcctctgctctctgtgaccctctgaaagattccttcctttctgttaccctttgtaggcatctctgaaaaactggtattggaaaatatgccttctttcaggcctgggcagctttccacatccactttctgcttacagatgactgacagcttaaggattaatttaaacccagattagtgacattctctttcagtccagattggtgatttgtggtgatttgggagtaaaattctctgaaaactttgtgggtgtcctacctatttgattccaatcagcgtttgatgctagcaatcccacccacagttcttaaaatacatttcttaggacagctatattctgtaattttcttatccacatatctctaactattgtccattgcagatactttgagccacttaggcttagagagagtaataccattaagctcattttctgggacacatacctttagttagatctcacgatgagataccttatccacttagtgctatagacatacttttttttctttttttttaaattttgagacagagtcttgccctgtcacccaggctgaagtgcagtggtgtgatcctggctcactacaacctacacttcctaggttcaagtgattctgctgcatcagcctcccgagtagctggaattacagctggtttttttttttttttgtatttattttcatttttatttatttattattattattatgttttttagtagtgacggggtttcaccatgttggccaagctggtctcgaactcctgacctcaagtgattcacccaccttggcctcccaaagtgttgggataccaggcgtgagccaccacacctggcctatagatatactcttaatatgacaattgcctctaagactgattttactttgcctttgttgttcaaagactatgaattttacatttttgctgtttgggctggaaatcagttgtctctgtattcctgaattcaaggacacagatttctttttcattcttgattccaaaccattttgttttctgaccaaatttcttataatcccttgccaaatgcagccaatagctacctacacaacacagatactgtttcttagcctcttttctaagagtcctgagtttactgggtacatgatctgtttaccaacttactaaaggttaacagttttactagatgttttcctactgcttaactgataacagtttcttccctacgtactgcttaattgcaaagccacagatcatagttttttttgttgttgctacagctgtctccttttcttgtacaaatgtctacatcaatcaaaatgtactaaattagtttctggtaacaaacacccacaacattttagtgatttaaacccacaaaggtttatttgctgttcgcactatgtgtccattgggctataggggttatattgtacattgtcctaactcaactgtctaagaagggagttttcctatttggagtgcaactgggaattatggcagatggaagggaactttaaaggtctctacctagaaataacaaatgtcagttatatttaccttttattggtcaaagaaagtcacatggccacatgtgatttaaagggaagaagaaatgcaatattactatgtatttaaaagaaggagacctagaaatatcggttatcagcattaaagactaccctgcttcttttaattttgataaaagattggttgattgtgtttaaagtctagaaggtctaaagctctgaaatgctagtgtttgcacaggtaacaaccaaatgtgatttcattattcaaatgtctgtagggctagaatatattaatcaactattataaaatatttatataaccatataatatctgctaaatttcagaagaaaagatgaatccattataaaataaatgaagactgcatcaagaatatttacttgctaatacagacagaaggtgttttgttttccaaatgaggacatttataactcataccatatcacgaagtttttgatcaactagaatttgcttctcattttctgctaatccccttacttgtatgagaggtatgcattaaggcacatttataaagatgtcatttaagtgtcttagaacttttagaatttgtccatggcaaaagatcatattcttttgaatgatctatggtacccatcaatgcaccaagtagaggggaggcaaagacatatttcacggacaacaacaaaaatggatgttctcttattactgggttaatttaattgaaatataatttatatttgctaacaaacaagaagaaaaatatctacaacaactaggcacaaaacatatatatatatatataaaattagctattttgcttttttataaaacaacacaaaaaacaaaagagtaaaacgatacaaaagatgccaaatgaatagatgaggttttggaaataattttctataatcggtaagaacaaccaggcaaatgcagcatctcatgaggtctagtagaatagttgtttatttattattatttatgttctatttactgttaaaaactgaatatccagttggtaaaatagcaagcctttgtcctgtgcagagagcactttctttttaaaactaaggttcattatgtttatctctgcacataattatcacagtcatttaaagtgtttcaaaaaaggattaatttttctcttacagctaccatacattatagaattaatgggaatctcaaaaacccctgtggtcactgtaccactgagatgtctgaaatagccttttctctgattttctttcttccaggcatcttttctttcaaatccatcctttatcctaccgttaaatcattctgtctacacatctttttttctaaaaatccttttttgttaatatgagttcaagacaaaaacaattttaatgccctattttttgtagcatacagtctagacctcttgtagtagcactcaggatccttcacagatgttacaatcattgcttttctcttccaagagaatggcaattctctattgctacctcagttgccacaggcatccccatttctggactgaaatattgtaccttcccttgcaatttgtactaaaacttaaaatccaagaagactcccatgaatattatcctacttttaaatgttaatgtcagaatgtttaattctccccataccccaataacttaaacatgcccaattattaagtaatgagatgatttcataagccaaagaatacatttttaaatttcttcacaggaccaagcttacagtgaatgctgacgaaacgtttgctagttttttgaccatgtagcattggcttattttccatctcccagcaaattcataaattagccacaaaattagactacccattttagttcctcattctctagaaccagaaactcttttaaatctagaacttgctgcctcacttccaaacaacagtagtagttacacatttctcttttccctggctttctgccctcacgttttttatcagttttcttatttgttgattcacaatccaattgttgaaaacatagtctatgctaagctactgtgctaaaagctgggaatggagaaactatctcctccttaaagagtccataacgtggttgagagagagaagctaaaccaatatgcacaataatgttatgagtgtttagactaaaatacagttgagtataatgggaaacatttgaaagcaaaagaattccaaagctcctacttcttaattgttgattttttccctaagtatcattttcttgttgtttcacatcattaaagaaactttttcattcctcttaagccttaagatccttgatctggttcctatgcaatggactatttttcctgttttcctcagtgacctggcctgctttttgctttctgtggcattcccaccagctttttgagcctcgctcaactctgggttaagccactatgacatcctgctgctttttccatctgtctataaattctgtagcaattcctattctgattctaaatatgagcctaatgcaatgagtgagttgacttcttcgactctcttgcctctgaactcttttttcatgtaatgctttctataagcattctggtctgtcgacctgaaatattgacactcccactttcatatcattatcattatgcttcacatgttagaggtctttatatatcccaaagtcatttacattctcctcattaataaaaaccttcagtacaagtgaagataggcacttgattgcagtgttgtaattagtaggagagttaggatttaaatccaggtgttctgattttaagctccatgaatctaccacattctctgcagaagcagcgtcatggctctctccactacgattctatctgctgtgaaaaccttctctagacattgaccttccaccgaggtagcataaatctttcttctgctaataacacatataattcatggatatattttaactaatcaaaatcttcactgttaaataaaggaagggaaatcccatggtgccaaagtcaaagggaaatttaaaaccagaattctatgttacagtgttttgctttggcaactcaaagatgggagggcaggaatgttagattaagttcgggtatagggccttggagttgttgagtggagttcagtatccactggggaacagaatctgtgaccttggattcaattgaagaaatgggaatgaataaccatgctaaagctggacctttacaagaaatggagtaagagaggaagtggggaaaattttcacatctgcctgagaagcaccaaagaacttgactctaccaaaatcctaggtgggaaataaaattttccagtgaaaagctgaaatcctaggccagagccacaaataagcatggagtctgaagttagtttataaatgttttgttagactcctcaagccaagctactaattttaaaacattttgaactagtaaacatcctgggagtgttaagaaagcaaagatgaaacaattatgtaataaccaaactggggtccatgagattcttaagggaaaaaagtttcactaaaaatgagctcatgagaaaaagtagaaagtacacgaggcgatatcacaccttgagggagttggccaacacgaattcaggaggagcagctctctcaaaacgagattacggaacagccacaaagaggctgggtaatatttactgcacagttgaagtaacttaaaaagtaaaaagaggaatagaatcacaaataataagaaaagacaatttttggtcaccatgttttgttgtttttacctcttcaatggttttttggctctgtctcctcatctccatccgtattgccactacttcagttcaggccttcatcatttctcatttggattactgccacaacctcctaattgactttcttggctgagcattgcaattttctctctccccaatcttgtttgtattcccacttgttcttcacattgctatatcaaaacacatcacccctctgatttacgtattataggctgattttagtctttgggatgtagttcaagctccttggaattgtattcatagctccttaagattggaccctagaccacctcttcaatatcatcacacagctgcctcatcctccatgcacttgccattctctctctctcacctctgtgcctctgcatgctctatctctgctgtttggaaaggtctccaagtctcctttgcctaggtcagttcccctttcaggaagcttcattgattcatcttctccacagcctcttccttagtctggattaggcttcttgccatcgtgcccccattcctttcagtgtcttctctgtcatggcattaccatgggtgtcttgatggtctgtggaccggggtgatccctactggattgtgggttccttgagggcaaggaccaggtcttgcttgtatttgcttcctgcacatttggcatagtgtctggcacaggtgatgaagcctgtgctattagtgagtgaggtggtttactggatggtttcctcttcggtgattcctctctgtttaaccctcttactgatttgatttccaacttaagctgaagcctttctcagctatctttcttaagtattaaaagtggatttgatttgcttctaagaatcctccatccctagtttcagggtcacatcactgtccctttatgatcatctacaaggggtcacacttgacagttttacctaaataattacataaagggagaaaatattgaatcctttctgttttctatcttgtttctttaattaatctttttgttttgtgtgatctcttttgcttttcccaatttctcttctttttttcagatattttcttcattcccgtatccatctttggttggatcttttctgtttcctttctttcatgctgacactaaaagcaatctatcaccttttgttctttcctgtcagtcaatctctggtccgtgacagattaactttgacaagtttttgtgctgaatataaatggtttctctctgtgtttaaaagggaacacacagcacacaaacaagctggggaaaggactatttatcacataagtagttggaaaaattgggataaacatattgatctattgcaatcttttgtttgtgctaagaccaagtaagtaattattcagactacttactaacctcctcacaatttaagattgcttaactttcagtgtaaacaaattttattgtggtctaagacaatttccaaatgctagcgttcacttattgaaaaggggaaagtctgtggaataataatgttctgccatcctccttttaatgagaatggttatggtaacattttgaaataaatatgtcataacaactatatgacagtatgttgaaataggataaatgggattattatctgggtttacaattagcataaccaaactgtagaataataatgggacatacatggaggaaaatgttaccctggttaaagaagctgggcactaaaatctacacagctgggtcagaattctggttctataatttattaggcacttggccttatacaaaacctcaggttcctcatatgtcaattaggctaaggattaaaaggaacaatgtattatttagcatgaattcctggcatataaaatacccgatatatgtaagtatgaaattaaaataatgattgtcgttagcttatctctctcatcctcctgttcccttcattattgccatccaacttaaatgcctactttcaaaattctcactattcttactctttctaaaccagtaaccagcacatttaaactgtgttgtgaccaattagtgggttatgaagtcaatttactgatctttatttttaaatgtaatacaatagaaaatattagagtgaattgtatgtactagcaaaaagtatttttgtgaaactttttagttatacatatggtctgactgacattttaaacaggcttttctgcctgctatatggactgtgggctctaggtgggcacagctggaagaaggagcttttactatcatccaagtgagtgattgtgaggaagatgaccggcatagaagaaatagttgtgggtgaaaagtggccagattaaggatagagttcatggtagaggcaacaggttttgttaactactggatgtaaggtaaaaattttttgttgtaccaagcgactggaaaaatggatttgccattttctgagatgaggatgcccctaagtggggtaggtttgtggactagaacagagaaagataaattttgagtatattaaatttaagatgcctattattatggatgtgaagatgttaaatagacagttagatatacaagtctaaattcaaaggtgagctctgggctgaagatgcacatttgggagtcattaggatatatatactatttgaaatcatgtgtctggatgagatcatcaaggttgtgagtggaatttagagaagggatgttgtccaaggactgaaccctggggtactgtgacatctagaccatgagaaaataactacaagcaagtaaagagactgagacactgcagccaatgagagggagattaacacctaggagagtgtggtgtcctaaagccgagtgaaaaaaagtacaactggagtgagtggtcacctgtgtcaagggctgtcagtggatcacaaggtggagatgatgtatttagccactgatgcttattgatgatgcacacaagcaccattttggtagggtggaagcaaaagtgtgagatacatattttgtgtgtctcaggttttacaacatgtaattgttataatgcaatacattttttgttcttacctttttttttaacatcatgtttttaaaatgcattctaggtcatacgtctaggttgttgctttttacttgcgcattctactgtatttttaactccatttctctgatgatggagacctatgtagtttctaagtcactgccctagtgaactttcctgtccccttttagtcttgtgctagtatttctctggggtacatacctaggaatgtaactactaggtcttaggacatggacattcttcatttttatgaaatactgccagatttttttttttagtattagtagctgaacttgtttaccttctcttcaacagcatatggaagttcaatatcttcataacttttttttacacttggatctaacccctttttcttgatatttttgttattctaatgggaattctgtggcttctcaatgttttaatttgcatatctctcattactaatagtttaacaacattttcatattgatattggcaatttgggcttcttcttttatgcacttgcctactcatatcttctttgtccagtttcctgctatctccattgaaccagctttctcctttttagagtcttcattatccactaatgacatcttctttgttgtttttttgccagttcccatgacacaagctacctctctttatgattccagagtctgtgttacagttctcttcagttaccttaagccttcaaatcaatgacttaatatccagctaacactgtaatgttatatttccttaactttctcgacttcattggccaagtctctaaatgagccaacatcaggggcaacttttgcaacgttccatttttaatctttcaaaataagagtttctttttttacaacaaacattttgcagtaatgtctggaagcagcactcccactatttgactccctgctgagcttcccaacacatgcactaacattccttaatccccatttgacacccagttgcagacacaattctttccagaaagaatgtaaggaaccaagccaaatgttttcctctccaagaagccgcacatacctacactgaactcacatggcactaagtagatattgtcccacaggtcactctttgcttcggttcaactgtcctataaggttatcaattgttggagggtgggcatgttagcataaaccaatataacatgggtgtaaagaactcggatcttaggcctggtagtcttggttcaaattctgactctgccacttaacaacttagtttcgagatgttacctaacctctctgtgacttggtttattacatcattgttgtaaagaattaaatgagttactacatgtaaaacacttaaaagaatgtccagaagattgtaatcactccataaatgttacccattactctaaatgttgatatccactctatttccattccagtgacatgttgtacatattaatagtacatgtttttaaaatgatttgaatatgaaagcaatatattacagatagtaggtgaaatgataactagaagtaaaaacaggaacaggaagctaagaaagcttaagaaatataagattaaagtggtaatttaattttaaattattgatttgaaggcccaagaaaaaaagcacgaagacgtaattgcaaccatcttctattattcattttctattttagccttggcccataaaaatgagaacttcacagataataggagaaaacttttcacctatctcttcacctcctcagacccgccgttcaggaggaaggctctactgatgggtgagattgagaggattactaagtatgactgcttgagccctgtttttgctctttcttttcacccagccttcctgcaggcaaagcctcttctcttctcctccaacagtaagtgcacaggggcaggacttgaccctgtgtggggagatacccataccaggggaagtaggaaagcctatgtttgccccagatgcaaactaaattctctaatacaaatttactagcagtgaggctgatgttttgattcttttctgacttctgtgttttatcacttagtttaccccttgagaagtcccagtaaaagggaagatgcacagcaagataaagaaaggcgatagagagggaataaacatggagagacaaatagaaaggagctggatagtggtaaatgaaaggatggagacatcttcatttgtttcatacagtaggaacactcatagaattgcagtgctggtgactgatgaagaatagattcaacagcaggaggtactgagagagagatagctatgaaaagggaccacaagtcctaatttggctgggacagtccaggtgtatgtctacagtcttagcattttgttcagtttagtattttcctgaacaaaggtatcccagtttggataattaattatatagtcaccacaggtgtggtggaaagaacaaggctgttgttggtgcatgataatggagaaaaccatagatgagcagtttcatgaggaacgtgatttttaagtgatgggtaattatatgcctttagttttaaatgccatctgaaaattggatgtcataacccttctttgaggaaatgttgtcattaacacaaagatagtcaaagagactatttccatttatctagtgcagtggattttttttttttttttgacggagtcgctctctgtcgcccaggctggactgcagtggcactatctcggctcactgcaagccccacctcccaggttcacatcattttcctgcctcagcctcccaagtagctgggactacaggcacccgccaccatgcccggctaattttttgtatttttttttttttttttttttttagtagagacggggtttcaccatgttagccaggatggtctcgatctcctgacctcatgatccgcccaccttggcctcccaaagtgctgggattacaggcatgagccaccatgcccggccgttcagttgtttttaaagtgtgatccctttaaggggacccatattagtgccacctgggaacttgttagaaatgaggattctcaggacccatccaaacctactgaatcagaatctttgagattggggctcagccatctatgttttaataaactctccaggtgaatcagatgcacaggaatgtttaagagccagtggtttcatttatatataataattgtgaaggcagaaatatgatagtgctataatctgtcaatcaatcatttgttaagaatcgatacaaagccctgtgttgggtactttattctgtgaaagatacaagagaacaaaaagatagtaaaataagcattctctacccttgagaagattgcagttgggttggggaaattggacctacacccataagaagttgtctaataatagaaaatgataaataagtaggcaagctaaaatgtctattggagttcaggagagaattcccaatgggagagcacagacaggagatactttgtggaggacatagaactcagaaacgagaacaggtgggaaatagcaggaaccaggagagtctaactggggagataagatcaattttcagcaaacaatgagtagcaactgaagagaacagtgttaatgccaatagggctctgtattggtcttattgaaaaaaggatccaaggtgaaatgttttcaaaacttgagattagacaaaattaaacaagtttcttttactgcatatacttctcagagtctttaaaatgctaaagagcaatgtggtgctccaagaaggattgtggcatttaccagttgacttatggtccttggagcagcagatgccaaaatgggataagatccctgaaaacacctctgaagtggaaagctcctgaatcatctcagctctcatggggtttaccaatgcatccagcatgctggccacctcttgcttatcctgttcaacccaattatgtcattgatcaaatggatcaaaatgatgttctgtgggatgtccagacaacccagatctttttagactttattataagaaattataggagaaaagtctagccttgaggcacaactgtaaataaatagtattgttcatcctctgtgaatgacaactgtttgtgattttcttttctatttgtaatgaaaaacagcatatttaccaaaagaatgtcaacatatgacttttaaggaggtatctgtaatagtcaagctcatagaagcagagaatacagtaatggggcattgtcacttaatgaatataaatttcttgttagaataaatgagtaagttctagagatctgctgtaaaatatagtgcctatagttagcaatacagtattgtacacttcaaaattgttaagatggtagatctcatgttaagtgttcttaccacaataaaaacaaaaaataaaacaaagggatacaaggacacttggggaggtgttgcatatttctattaccttgattgtagtgatggtatcatggatgtttgcacatattcaaactcatcaaattgtacacattaaatacatgcagctctttgtatatcaattatacctcaataaagccatttaaaaatcagcaaagcctttctaatctgctttagcaatgccacatccagcatagcagctgagatgaggcatctggcggagtctatggtagtctatagtcattgtccaggttccatctggtttctgcaagagctagttcagagaatgaagtggagacatgatacagcatcgaccctgcctcctttaggaatttagtgatggcaatcaagtttaacagtctcccactcccaggataaaaaatatttttaatttactaaatttcggctagaggtgggggaaagtctcagtggttgctacttggtcttttccaagaccagagatctaatacagtggtgacttcagctgccaagtatgttagtaacaattgtacactcagggactgaaaaaatcaccattgggtaggtccatacacctagtgggcccaccttaaaatggacctgagatgagacttatttattacttggtcatcacaagcacctacttaaacagagaggctataataatgctttgggtttctgagtatcaacttcaattcagaccttatattcaattatccttgagatgtatgggcattccttgtccccagtgtaccattatatgaatatatggcagaaggaccagggaaacactaagtccttcctcccaggaacccagccaattcctcagtaagatgtttccagatctgaaaattggcttaagtctgtgaactgagcaaaggatagtgactttctattgaggtaattcccttcagccatccaatcctccattcttactttctgcatttgttactgtaatttcagcttcctggcttaagaggaaaagcactcttccatggcctctattattcggggccctattatcctcatggatattaacaagcccatctctgtgactcctctcctagaccaggtcagcagagcagagttaccattggacaatttttgtgatactagtgtccctctcactagtgtattcctgatagtggctggtgtgtccaccaggcttcccattgagtgcaattctctgaggggttgtctaactgcacataatatatccagcatagcatgcccactttgctcagctctttattcctttctctgtcatttgccaaggcaactcaagcaactcaagcacattcagcattggtcattgctttctctaggcttctaagagctaccctaaagtcaatatcccctgtcccccagtgttcttgctgggatagtaaattctgtggacccaagtcaatgaattcttacttattcagccttaaattattaccctctcaattaagttacctcaaaattcaattacccagaggtaattcccagggtcctgccagtataggctagctaattctttcagctttttagtatatcatctctttccttgcttatcagactcactgtattcctagcagagttatactgggatgtagcctattatctgtctgatgactgccagtagaggaggtatggggcagtccctgaagtgggtatgactgcattgttggtggggaggtctctgctgcaattttaagcataagagaagtgctaactctcaccgggtatggtggctcatgcctgtaaccccagcagtttgggaggccaaggaaggcaaatcacctgaggtcaggagtttgagaccatcctgaccaacatggagaaaccccatctctactaaaaatacaaaattagctgggcatggtggcacacgtctgtaatcccagctactcaggaggctgaggcaggagaatcgcttgaacctgggaggtgaagattcggcgagccaaaatctttaactgtttctagggaagagtgtactacatcagcaaactttgaggtttcagagggtctgcagagctcacgtcctcagaggcatccatccaaatgtctttatctatgtttcagggttccagattttcctggaactaaactaaaattttcctgggacttgaactaaacatagatttgccttggctgagcattaaaacatttctggagctctgcaactctaacagttaagtcttcagcctgctgctcatctgtttgtgccgttcactgcaggaggtactagtctcttggcaagctaccagtaaagctcccttgctctcatcttttagtcttaaactgcttgtcatggttttcagtttctcattatccttctgcagggcatcaatccaacttagcaataaccagacaatgccttattctctagagattgttcccatgatctctatcaaatgcctttgtgctcacaccaggcgtattcccccatacatttttcctagatcaccattaatagtctttagtcattgggtcactgcctccttccaggaactctgcattggccatatatcatgcaggagcatgcatatattctttgtcttcttggcagtaagtgagccagcatccaaactctatttttccatctgtgttcttgtattacttctgggaccccctgtgatagttcagctgctctaagaagtacatgccaagatgggattaagtatgcaaaataattttttggtgggggggatggtgaaagcatatgaaggataaggggaagggagcataaggtggagagagacttcaggccacaatgcaaatctgaaatctgtaaaagagagggaaagaggagaactgggtagaaaaagaatcaaattgctacgcagttcaaataaagttttggtcaggttcatttggaaccatgagtcaaaattgtccattagaagcatcctgtgtcttgtattagttcttttgctctgctcatttcttggctgttagaaactcatagggaaacatgagattccccatgtctcagggcagacatggtggtggttctgtgttcccaccagagatctgagtggtgcatttcatggctgcgaaaggtcttgcattttcaaacttctttgatcatggactttacctgtaaaacatctttaagggatgttcagtgaaatatactttttaaaactctgggctttatatttgtgttaaaatttgagttgctgatataaattaacttaggagtgcacatgatacctcttttaatgtctgtggttttcactgcttttctttggtcaagagaatgctctgtatttttaccgtattttaaaacaaaggtctatataatagattactatttaccagaaaatgttcaaggattctgtttcagtcagctcaggctgctataacaacatgataaatttggtgggttaaacaacaggtattttattgctcacaatggagtctgagaagtccaggattaaagtgcctgccaatttggtgtctgctgaggaccctcttctgggattgcagagggccatcttgctatatcctcacatagcagagacagagatcatctctctcatatctcttttagggacactaattccattcagaagagttccacatttatgacctaattacttaccaaaggccacacctccaaattccatcacattggggattatggctttagcataagaattttggagagacgcaaacattcagtccatatcaattgttctatatgttaacttgtaacagtacatttgagacaggcactcttattatcaccactttacaagtgaagaggctaaggcttcaagaagttacatgacttgcctaaaaatcacatagctagtaagtgattgtgccacttgtaagttgtgcaacttgtaagttgaacccacaatgtctggctccagagtcagtgctctcaaccgctgtgcaatgctgccatgtgggcattcctgtgttgtctatggctctgcagaagagttttggaagctaatgctgaacatgacttagcaggttattgttaatgaaggaccctgagtggctggtgcaacgtaacttggatgactcagataagtgggactctgatagccagagagtgcatcccccaatgaacacatgtagaaatatgcactccataaatatatattatttccaccatggataaatacatatataaacctgtatgcacatgcttcatacacatcaatatatcatgtagctatcccatgccttataatatgttcattttaagtatacacagtcagaacatttttagtattcccataaatgtattagtaactggttagtatgggatctgtcgggtttgaagccatacagacttttactctaattagcagtgggatcttcagcaggtatttttacatctttgagcttcagttgtctcatcaataaaagcagctatcatcatacctatctcacagggttgctctgaagatcacatgagagaagagaagtaaaactgcctaacacagctccagtactcaggagagcagtgaacattgtgttaacttgaattaaatatcatttacaattcttaacacgatggaggtttctaatgattattaataaaatgaacgtggattatgttaacctgagctggtttcaaaatatgtaccctgcagtttaagtccagccttctcgtttttctctaggctaaaatcttcaggggtcctgaattatcttcttagcactctcactggtcagctgtgtgattctagacaagcaactttccactattgtttctgagttgagattctcggattcagtaccatggagaagtgctgggttggctgcaagaacttcagcagaaaactttttaaaaattagtcgaaggctctacctcagtgattctgtctgatagcattttattccttaggataatgctagctactgtaagaaataaatccctgaattggccgggcgcggtggctcacgtttgtaatcccagcactttgggaggccaaggcgggcggatcacgaggtcaggagagagagacaatcctggctaacacggtgaaaccccgtctcactaaaaatacaaaaaattagccgggcgtggtgccgggcgcctgtagtcccagctactggggaggctgaggcaggagaatggcgtgaacccgggaggcggagcttgcagtgagccaagatagcgccacatcactccagcctgggggacagagagactccgtctcaaaataaataaataaataaataaataaataaataaataaataaataaataaatccctgaatgttagtggtttaatgcagaggagtttatttcctggtcatgtaacagtctgatgaaggggttactgccatttgtgccgctattccctctgtcgggggttcatcttctttcatgttgttgctctgtcctccaccagggcattagagtcctctgtttccagctagcagacatagaaaagtgaatgtaggagtgcatgcaaagtgaggcacatctctttctcttagattcatcaactagaacttagcctaattgtgcacctaggctcaaggggctgtgggagatgtagactctgactagatagtcctatttcagggacagttttatgctcaaaggaggagaactcatttcttttgtgaacctccagctttctctaccatggccagacttgtgactcagtgaacttgatggcacccaagataatcagactatatgcctaaagcacagtatgtatagaggaatcttacttaaccattgtttaacaagggttgtaaaacttttggaaactctgaaacttgaactcgtatcctacatttgaattccacggcaaagagaaaaccagaaaatattatgaaaaactttatctctcatgtaaattcccacaatgttggatgttggagcattaattgctgtcaccctttgctaattcccttatcctttgggtatgtggatagcaaaaatcttttcaaataaaaagaagtattttatttcaatcactataccaacgttttataagaataaattcacttgttcttcagcacatgtagattgtgttatttttgaatataatgttcttattgagtgttaattatatgcacctacactttcaaagaagtgataactagatactgtcaaactgataacagccagtcttctctctagctttatgcatgtgttaatttataaggtggattagcaggaacttcacaagccctttatttttggtctgcttggagatgagagcgatgaaagaaaaaaatgcagatatattgcttctgtttaaaaattcgtaataagacaatgggcagaagtgctctagcacagaagtttctattgatgaaagcatttgccaatttaccctaatttcctgaacgtttacggttagcaaagaaagtacacataagcacagaaaaatctatttttatttttctatgattttcttaatttacaccctttaatttggaaaagacccatttaactgtgcttaaaattatttgcagggcacggtctattgttaacattttcatgtaacttcatagggtccaatgaaatgggtgcagaaggtgtagcccaggtatcacatttatagatgggcctggtattagaatatgccatgtccatgttcagaacttcatttttaaataaatttcttgaaatttatgatgattcagaagtaattcagatttaatttaaatgtttcttataaggtttgctaaataaaatactgccaaaaaggttggaagagtatattgaactttaaagcaatttagaagccttagttgtgtgcttttgggatgctcaggttcatgggcaaacacagcaggggcacttttgtgcacgcagagttctgaaacagcgctaagggaacagacccaatgtgtaaggcaggggccttattttcagccactctatggctgcccttgaaattcatgtaatgctttaagatatatcctcacattctatgaggacatgggctttgtttcatagggtccttgaatttcagtagagttggcccctttacagtgttatgtaatattttgttattgaatgaatatatgaaaatgcatgcatcaaaaatgtccaatgacttcatttatattctgcatttaatctatttctaattagtgaacttttaagtaatgtgaaaagtggcttcaggatagtttggggttcaattgaggacatgttttagagtaaaaaatatctataatactcaaagattttgttagaaaatgacaaaggaggtcattgagttatggtccctttttccacaaagctaatttctttctttattgtgaactactgtttaatattctttcatagcatacaaaatttattttaaaagataatgttcattttatggaaaactttatggtgttctggctttttctatttattttcctcattcctttttgaggactgatttaactcagcatgtatgtttcagatgagtgaatatttaggaagcaaattcttaatagctagatgatctgacagtggatattcgaaagggtaaagcaacggaaataacatggtgaacatttcaggatcctggtgaattattatgcggaaagtttttgaaaatttatttttcgttaagttagtctgaacctgaattgttatcataacaatgcagcatattcttctgtctaaggaggtaagtgaaatcagatttaaaaactcaataactatacttagaaatggcacattaaaacttaattttattttctcccttttaagcaagactcagccctttgtctactttcaatcctgttctggggcacacactttttctgaaggcaagctgagagcactttgcattgtaagcaaactgaggttcagccttaccctgcccctgtcctgattaatatttggacatttacctggttctccttttcccacatgctccaagcaaaaacttgcaggcatgtgcagagtcacaggcaggctctcccagggaggcgggagcagaggtccactagcaggcagcatcatcatgttctcttgatctctataggttctgggacctttaaacctaggtggaaggtgattaaagaaaggaagagattgatgtatgtcgtagcagagaaagagaagtggggacatctgccaagcatggtcagcatggtttcctatatcctaggaaagctaatcaggaccgtttctgtaggacctgtatcatttgaaatcttttctgcttttgagtttaaggcagaaagatgtagtcaggagaaacagatagagaagcaggaggtaagcccaatggcttgtgggggaagagaatgtttacagtgtacacttgatagggaaggcaattttattcctgtcttcccagatcatccccacttctagttccttactttgttgctagatgctcccatgagaggaagaaggagttgctatcccaggcctgggatcttgatactgtcagttgccagggttatcattccttaatattacaaagttatgcctatttattattatcttcctggttttatgcagcagagtgggcaagtggtcttagggtctcagggagcttgattaagaggcagcctcattcttgtattctctgtctctctgtctctttctccccctaaaatctacttgatcttagatacagacttggatgtttgttagtttcttcaaatagtgtttttttttttctttttaagttttattttaggtttgatggtacatatgaaggtttgttacataaacacatgtcatgggggtttgttgtacagattatctcatcacccaggtattaaccccagtacccaatcttttgggtacttttgggtacccagttatcttttctgctcctctctcttctctcaccctctccactagagtagaccccagagtctgttgtttctttctttgtgttcattagttcttatcatttagctcccacttataaataagaacatgtggtatttggttttctgttcctgcattaatttgctaaggaaaatagcctccagccccatccatgttcccacaaaagacatgatctcattctttctaatgactgcatagtattccatggagtataggtaccacattttctttatctaatctgtcattgatgggcatttaggttgattccatgtctttgctattgtgaatagtgctgcaataaacattcatgtgcatgtgtctttatggcagaatgatttactatttatattcctgtgggtatatacccagtaatggggttgctgggtcaaatggtagtatactttaagctctttgaggaattcaccatactgctttctacaatggttgaattaatttacactcccaccaacagtgtataagtgtttgtaataacaactcattgtggttttgatttgcacttctttaatggtcagtaatatagagcttttattttcttgcttgttggccacatgtatgtcttcttttgagaagtgtctgttcatgtcctttgcccattttttaacggggttgtttgttttttctcttgtaaatttgtttaagtttcttatagatgctggatattggaccattgtcagatgaatagtttggaaatattttctccatcagagctctgtattagctacttgcatagttactagttaagtagtacttcaattcctatttttctgcagagaggagtaatgggcaggaaaagctagagacacccccagatatttggccataatactatcacacaccacccaaaccccatcttttaaaataggcaactaaaagtatagaaagacaatttgttttgatgagagggggaagaagatatttggggtcaaacagacatgtgtttgaatccttgcctaaacttagtgactagttatttattacattttaagttgttggtctgagcctattttattatccctaaaatggggtttgtaatattttccctgaagagttgttgtaaaagtcgcacctagtacattccattctttgatatataatagacatgaatttataggcatttttatctaatcagcttctgagatttttccctcctttcccctcttgcaaaagacctctttctctctttcatacacaacaaccctcaggctgcctgtcatctttctctgacttctctttttttcttaaaggttgccctgattcactgtcatcagacttcatttgtatatacctacaggcagttgagggctgagtaaaatagaaggacataagtcttgtgggcttacagcgacttagataatacaggcatatgacataggtcacctctctgtcaggcgacttcatgatccttgttggtaacccaagaaggctaatggcataacatgctttcaaactgataattcttacatatcttttcaacttttatttagagtgaacaggtgatgtttctattgaaaaaaatgtatatttttttctgtgtataatgtagtttgttgtatgtaatgaagcagtaaaaattgttttagaattatctttcatttcacaattttaagtcattcttaaacaagtaacattggttattcatacagacaaagtgttaaatatgttcccctttccacctctttatctggctattaaaaatatcatctaaatagatacttaaccttatttctggactctgccaatctttcttcattctactcatgtcggggtcttgatcatttattgtcattatgcattttgaagttgttaggaattttacctttgaatttcacatatatacgtatttatacatatatgtatgaaatgcacacacacataaacagacacacacaaatagttctccctagaagaaagataaattactggcagtattttgtcaataataataattcattttgtgttgcaattttgaataatctccagctctcagtttaatttttcctcttaaatttttataaatgccagtgattataaacagcatagtttatttctttaaaaacccaagatgacctgactaaataaatgaaattttgaaaatctgtaaaaatgatataaaaatgtcatctatgagtaaaaatattaatgatacatactaaccttaacatattactttataatttctttatagttacaaaacgatatcatatttattactctattcctgacagcaaacctataaattagttattattaatattttagacaagaaatagagacctaagtcatttcatttatctaagagtatgaagctaaaggttggcatgaccaggactgaaatctaaatcctttagatccaaatcctatgctctttcctgtgaccatgttgcaggtaacagatatttttatttttagaaaattgagcaaatgctccaaatcttaggttaagagtcagagaggcaagaatagaaaatcatccacctgggatgatttgtcctagagagtgcaattaactcgctcccaaagtgttttaaagatctgggacatttttgattaagtaggtgaaggttggtaaaatttgccaactttttccattctgacttcattcactttttgtactttaaatgtgatttcatagaaccaagaagtaatgaaccatcacataaaaggctgacagtccatggtggcttcaggcacatgagataccttttattctactatatagggtttcagaaaaaaaaattatgtatagatttgaaagattcatggaaaatggtttggaggcaagttacacaaaacagaatgatggttagggatggaagggtatatttcattcatggaagggagatgtttgagacgttatcattgagatgtgatatcaattaattaggattttgtacatttacattacaaatcaaattggtatcattattttggattcagtgattcaatgaaccttagtgttactgatgagtagtagatactttactttcaaaacactttcagattgttaggcagcagtggggaagattgcaaggaaagcagaggttgaaataagccttccaggtttaagggtcttggtgctcttaaaaaatgtagtggtactacaataaaatattttaacagaaaggaatctcaaagagtaaggcatttctactttgcacatgggattttatacaaagaacaaccatgctatatttcctgaaggtaatgttatttttgaatgcaggatggggtcgaattattagcaattacattttcacatgcaatatcataggagtctcttggcttttatactcttagaatttttcagtgactcagcagattgagttgcaatgtcaaaaggaaggagttgagaagcatggccttgagggacaaaagaaagaaaaccaagtcacggaagctttgcaatttgtccaaaattttcagctcctaaatctatgttcttgaactgtatatcctcagagttctgtgaaatcgggataataataacccaaatccacaatgttactgtagtattaaactagaaaataagtgataagtgcttaacacagtatgaagcagacacactgcaagatgccgtaaggttacaatgaaactaattatgcttattaaacattctatgccttctttaccataccacacagtagtaacacagacaatttagtacggggaacagagttggtagaaaagctgctgcttctttgttcttgcaatgtcagggagtgctggattttgggtaggtgttgcaggaacagggataggagtttgaggtaggtggaagagggaggaaatagaacaagacccaggagcctgcccatgacactgttgtgaaagttaacatccttttaccaaacaccctgagtccgcctactaccccaatgttagcaaaagtatttgaaaaagggctcattcatttacaaattctttattctgaattgatagttctccaaaataagggagactaatttcacggcagtcccccaaatgcaggggttgcttgcatggcattgagaaccatgcttcttgctccagtggcacatgggcaggcttgtgtatgctaaagaatggagattcacagcaggaatggggagagacctttaaagctcacagtaagttaagcatatgggtaaaatagactgcctgttatgcacaccaccctcttatgtgaccctttcggaaaaaaacttctcaatataaggaaattatgacctactcaaaggaattatctccctgctttcagctccactgagttattcaacttctgtcagtgtaactttctatttgagttatatagggaagaaaaaaaaaaaaacatttggcttaacttggtatagtatttttcaaaattcaagcatccctagagttcttagaaagtaatgagcattgagtttgtctttggcccagagagtttttatccactgtcttggaagaagttgacagttctgacacttgatcattcatacctggtgacttgtgtgtctccagtgaaactcgaagacagaacccagtctctaatgatagaaaaaaaaaaaaaggaaagcaaagaaaatgtgttttcttaaccaccattataggagatggacagttcatattttaaggtaaaaaatgaaatttttcttgggtctcttaaatgggggaagtttgatatttaatcaggttaaaactattatcaaataagatcattttgattatccggtgactttttgttatatgacatccattaggggttcagtttaattgctaagtaatgtgttggtggctagaacatattttattgagatcttatttgaaaaagcatctgtaaattttcatcaaacatctcaaattacatctttcaaaaatccatgactatacttaaatttctatgagctaattgctcagacaataaacaacaataagtaatgaacaatggtatttgttcctaatcttttttctaaatgttaattatacagttctttttttgttttcagtttcatttttagattccactgactggcttgtgtttcaggaactgggctaacccagagaacaacacatgtatcagtcagggctcaaccagagaaagagaatcattaggagaggtacatattaagagatttattgcagtgaattgattgacacagttgtcagggctggctaggcaaatccgaaatcgacaggacagggcatcaggaagggcaggctggaactcttgggaactagcagaagttgctgtccacaggtgaaatttattcttcatcagggaagcctcaactctactttaacatgtattaactgagggaatcaggtccactcaattgtctaggagaattcccttactagaagtcaattgattatggattttgaaaatatcaacaaaatgccttcacagcaacatgtggactggtgtttgattaaataactggggactgtagcctagctaagttgacacatctgaagaccatcacaacatgtcagcatataactgatccatgtgaatagcaaataattaatactaattgactattttattcaaacagggcttatctttgcattcccaaaaagatttcattttgaagatgcttcagcattgccttctaattctcagtataacctcaaataaataagtcagtaggtgacgcgggttgggttttcatctggagaaaatctctgagttatctaaaccagatattaatgctccaggcctataaatatcagcacatagctgctatttggaggacatgggattatcttcttttctttctccaacttctttttagtcttaataggggaaaccattctttcatggaattgattatttgctgctatggtaaagaagtaataggatttttaaaaatgtataaaataatgttgaatacatgatggctaagttcccaggcttgcccctacaaactcagttcaaagatcaaaaactggaccctttagctgtatacccccatttggagagttcttccttaaggcaactataccacaaacttacagctagtttatgaagtatatatacacccaactgatatcacttccctgtgtactcatttgttaaattgttctatttttagtataataattatttctaattgtttctcataaggtaacgtttatcgagtttctactacatgctagacttgatgccagaagctgtggtataaaaccacaaaggcaaaggaaacagccttacagagcttaattgtgcattcaatttggggtaattggtataataagggaagtagaaaattctgtaagagaatatatgggggcaccagcgaatttctaatgattttttttctagaggaattaatagctaaactgagattcacttggtttagggcaggagggaatggaaagggcaggaggagaggaagcacatgcatgaaagataagaagtgagatagcatgatggattatgagagaggttgtatcaggttgaagcatagaattcaaaatgagagggttggagtgtccagagatgagattgggtggggggcggtaagtaaaggccagatattagaagaaattaattttaatcttcacctgcagaaaatcaaaaggcatcagagagctggaagtgaaaaagcaagaagggggcagatttgcattttagaaaaatctctctgcttgtagtatagatgacagattgaagaaagggatcctgtaaatcagaaggtaatggatgtttcaattttacacattattgtacatatattcccactgactagttcagtgcttgaaatacagtaggcattgatttattaatgtattctttcatttcattccatatgcattagtcacttaactgctgtgttagtcagtttctccaaagaaagaaccaataggagatagatagatagatggaaagattagatagatagatagatagatagatagatagatagatagatagatagatagatggatgaaaggagatttattgggggaattgggtcacatgaccagggaggctgcaaagtctcatgagaagctgtctgcaagctagagaccctgggatgctggtagcatgtctcagtacaagtatgcaggcctcagaaccagggaagctgatggtgtaactcttagtgtgaggcagaaagcctaagaacctagggggccattggtgtaagtcctggagtccaaaagctggagggcctggagtcccaatgtctgaggcggtaaaagaagaatgtctcctagctcccagagaaaaagagagagtccaattcacccttttttctaatttttttgctctatcctgggtctcagctaattgaatggtgcctggccactttgagggtggatcttcccccaggcagtcctctcagactcataagctgagctcttctggaaatactctcattctagatattccttaatccagtcaaattgacacctaagattaaccatcacaactgctctctataatactccatgctatatgcaaagaagatagtaagtactaaattagactggcatggtctaagccataatgggtctcatgggagagggagataaacaataaattaatgaataagataattatatattgtgctaaactccatgaaagaaaacaaagattgctccgatagagaacagcatgtgctacttcaggtaaggttgtcagagaaaacctgcttaaggaggtggtagccttaagatagaaattggaaaatgagtattttagaataaaccgcaaaaagtaaaatcaggtgggagctattacaaagacccaaaaaggatatgataagtatcaatacaataggtcataattgtattgtaggtcagagaactcataattaagtagggggtggaggcagactaggggaatatatttgtagtacaatgtgaagaataatagagttatgtccaaaatgctacaagagaatataggaataaatacttcttttggatatatatagaggaagtcttcacagagagggtagaattagatctgcttttgaaaaataggtaggacttcaccagagagggaaatgcatgaagttcagtgaggaatggccagtctgagggctgagcttgagtaaaggcatgagagatgcaacaaaaaagcatggtattcctgggaacagtgacaggactagatgggctttaacgtagagtctgtagcagacagagggcttgtgatctaccttgctctgaaaggatattcttactctgctaacccagaaatacaccttataatggagctggactaaaatagacccgttttatgatggtgcctcatttgacttttccatggtctgactgcaatgctcaaagtttgtcactccatatttgttattgttttgtataaagtccactcaaaccaccatttttgcctttaaatagttgtctggctttccagagtaaccaacataatacattactaaacatgtccattaataatttcaatttagttttaagagtgtaaagggatctcaaagtcttctaatttggtctcttccttaatgatagttagtcttaggataatcaagcatgtatttatttttccatctatgtcagtatttctctttttttgtcttttctctctggcctttgtctcttttttctcaaccactctctgttttctttctgaattgcttttctccatcatacttcctaatattacaaatctatagctgcctccccaaaaaacttgcccttgcaagaagcaacaaatagatgtgaataacgttctagagacatcctgatttttgtgcccttactcttaggtcttattagaatagtgttcctataagcagtggccttttaaacatattttaataatatttctgatattttaaaaatgtgttttatcattaaaaaaattaacatcaccaccaaaaatcttctcctttatgatgtgcttatttcacagcacatgcctgtatcaaaacatctcatatagcccataaatatatatacctattgtgtatccacaaacttttttttttttttttgagacagagtctcgctctgttgcccaggctggagtgcagtggctcgatctcagctcactgtaagctccgcctcctgggttcacgccatcctcctgcctcagcctcctgagtagctgggactacaggtgcctgccaccatgcccggctaatttttttgtatttttagtagggacggggtttcaccgtgttagccaggatggtctcgatcacctgaacttatggtctgcccgcctcaacctcccaaagtgctgggattacaggcgtgagccacagcacctgaccaaacattttaagaaaatactgtatattctagaaaacttgttctaaaattgttctgtaaatctgactctatgtatgtattagattatatatatgtatgtatatgtatgtatcagactctagtatgtattagatttgtccagttgaaaaatgtgctaataccattgtgccttaattttgttttctttttaggtaaatgttatcaactgtagagactgaaaattaggaatataccaaacatcattaagaattttaatgcttttttctttcatttaaacaatatagtttaaataagcttatatccagtttataaatctgaaatagataattagtggtaaaaaaaacatagtagacttctgctttgagaacagcatcaaacattgctgtttcaaaatgccacttaaaatcatctgacctacattgtcatcttcttttgaatggtttttattgccatgttaacagcttgacctgaagtttgtcttctttggcctccagtggaaaaatatcattcggttgactggttcttagaaaagtttattaaagttggctacacaatttaacagtgtaacagaaactggggctaatgcaaactgtggctcgaaggggcagcatttagcatggaagagtcctgttcctctaaactgtaaaacattcacagcagagtcaccgtgtactttcaggagccacctcacacgctgaagtcaagttatcactcaataaattgttgagaacatttcattggcagtgaaatcttttaagaaagcttttccagctaagcaccacctgctggaggccacctgttttctgagcaacaaggtacccaatcaaggagcccaacttggtttgggtttctaaggcatctttccagattctatagcattgaaaagctagagacaatttggtgcaggtgaagtctaaatattatgaacaaagattatttattgagactccattagtaactccattaatagacatatatgtctatcactatgttataaaaaagtggataagactggaggagccttgtgggatctatacttaatttgagaagacaagcatatataattacctagttatattgattcttatatttaaagagtgcaaatgagccataggtcagtgaggtaggagaggagaaagcaaagtaatgaaaatttctcatccattatgacacacagaatacctactagaataagttaacctttgtgtatgttcttgttggaaatctctgtagtgttgctgctaaatggtagtgtgttcattgtcaaatttgttgcccagagagcaataccttgagttggtgcattgacttcacttgcgttcttctcgactgataacattgttttatttaccgataaaaatcatgattcataaacatagcacaggttcaacagagggctgaattaatattttaaggcatttgtctgagcaactaataacaacacagcctgtcttgaaaggtctctaatattattatgctctcataatatttagaataagaggaagattatgccaacaatagagtcattcatttattcaaatcaagagaggaatgtaggtgcctactgtgtgccaggcactggggtaggagctgaaaggcaacatttactaagacatggcctttcttttgtgtgttttcagcaagaatatgcatgcagagcccatagtctatatgaagtgatagataacattcttaattacaatataaaatgaaagcattaataggtacaagtaaaacatgtctggggagcatcaagaatagaggaatatttgcaaggtgaaggcttcccagagaggtgactttagaggcttatcttgaaggaagaatagatgttgtaaggcagataggctgtattacagtagtagcaaaatcattttatcatgtatattttgccgactattttgttacacatatcttttttctttgcaatacattttattaattatcctaataactctgtgattcaggtaccattgtcatctccattttagagaatgaaaaaagtaccaagtatagagaggttagtaatttgtcaaggtctcccagcctgtgtgtggagagcgatcactgctgagcctgatctcttatccacctaaatgaaaccatgtgtcactgtgctggtgagaggaatagacacaagggttgtgaaaaacttagcatgattttctggccctggttattagaattcagttttggtgagactgtgagatcgagaataaggtccagatcgtatgattcttttacatccctttcaatgccctatataaatttcctagataattacagacatgaactctttttatgtgtatgtgtgaaaatatttttgaagcagaaagtcatttacagatacaaagtacaacttttaaaatatttgggataaagatgttctctgaagcaagttccttgccattgattcatgagtattgagtctttactaaggaaactttgcaaaatcataaatgatacataaataagtgatgtgcttgcaagattctgacaaagtcagttagtatcaaaaaagagacataaataaattagttccttgttgaataaaatgtatgaaaaaaatcagaagaatgaaccttaaaggattcagatcctcacttaattatatgggtagtgaaatctaactgccataaaacgtcagcttctgtgaatacatccacaattccagatataacagcctgccttttgctgtgacattgtttatcaatttctggaggctcactaggtgcatttaatatttaaatacaagggaaaccgagaagagaagacattcttcctgccacacgtatagattataacacatcgttgtggaaataatatgataaagacaacatcatggctgcaccaccattaaatctgttctcttagttctttagtggaaagatgtggagtcacctacccacggtttgcttgatttcttcatctttgaagagctaaattatgttatgttttagaaatgattttttgatttctcttttctccaaatcccttgattgctcaagcctgggttatttttaaaagctttagattttctttgcactcatttctcatttagagtttgaaatgatatgatcaagtacatctgccttaagaaatagcatttaaatcaagatctggatgaatttgaagtagttttttaaaagtagagagcattttattaactaagtttctgcccatgggaatattttaaatgtgtgaggataaagagaatatgttatcttcccagcagctggtgtgagaaagcttgttgagaagaggctttgataaagccaccagggggtgagaacaatactttggagtcttgggtagaacttatgcctaggtttcatgtaaggaagagagtagcgctgaaaaatgaagaatgaatgaaataagagttagaatggtcagtgtgtgggacagcccagaacggcggttttgaaagtgtaggacatatcccattagtaagtcatggaatcagttaatggatgtcaaccagccacttaaaaaaaaagggggaggaagagaataggaaatattggtatgtaagacatagtgaagattaataatttttaaggaaatatttgcatgtcacatatagtgaagattaagtattgttttgtaaaatgtttcaattttatgtgtgtgcatatgtattgggtaaatatatttcttatagaatcttggtaaaaataaattacaaaaaatgatctacagagaaagggaatgtgaattaatggtaggacaggggctttctttggggaagaataaagctaagagtttataaaccctttccatctctctggcaaaaacttcagtgaattctaccttgttacaaatacctccaataaaatgaatcttgttgttttgtgtgtgtgtgtgtgtgtgtgtgtatgcacttgtgcacacatatgggagtgtataagcttagtattaggaacagggaaggtatcaaggaggtagaaaagaacagatgaccgtgagtacgtagaattacatatctgtgtatatggatatgtagaattacatgtgtgcgtgtgtccatatttgagtgtctttaatgtatccacatatcatggatactgcatttaaatttttggatacatttaaataatatcatctgtaggtgagaaactaataaatttcaaatagctttattgaaaatggaaagcagtgtaaatataggtagttacttaattattcaatttaattttgaattctgtcacttgaaatgagatgtacgattaactaaatgtgtattatcaggtccaatgccaaaagtcactttatttttaagaaatttttttcacattgctgattttcaaggtactatcagaaagattgtcagagtatgctattttaatattttttcacaaaaacattagtctgaaaagtccacctatgtgcaagagtgtgagttcctctgcatatatatcccaatattttgtgttagaatttaatgtcatgttttactctgttttctacaattcattatcttcatctgtagattaaataattttaggagtatttcagaaactgctgaatattttttagcatcttcattaagacaaatatttttcctttttccttcctcttacccattcttcctttatattctttccttcttttcatatataaactgagtttctcccatgtgccataagctgggaagacagacactgtccctgtcctcatagagttacagtaaaggggaaggacaaggagtgagagcgcacatcgttgggcatctagcatagaagtaggggtttggaggaagtccctgggtcaaatgacatctcagatgctacctcaagtatcagaaatgcatgaccaggcaagtcagagctgggatgaggtgaaagtgttataggaagaagaaatagcatgtgcatagggtgggtgacaagatgaacatgggagagagaggtgagagacgaccacagagaggtgagaaggggctacatctcgctatgaaatctactgaaaccaggtaagagtctggttgtgtcgtaaaagcaatggggacttgctgatggcatttacgccagctccacttgagtaggaatatatttctgaaaacaacccaaagccactcaacatccagtgtagacttagaccagaggtcaagaaattttttttgtaaagaatcagagatttttttaaaaattatactttaagttctgggatacatgtgcagaacgtgcaggtttgtaacataggtatgcacgttccatggtggtttgctgcactcaccaaccaatccgtcacctacattagatatttctcctaatgctctccctcccttagcctcccacccgctgacaggccccagtgtgtgatgttcccctccctgtgtccatgtgttctcattgttcaaatcccacttatgagtgagaacatgcagtctttggttttctgttcctgtgttagtttgctgagaatgatggtttccagcttcatctgtgtccctgcaaagggcatgaattcatccttttttatggctgcatagtattctatggtgtatatgtaccacattttctttattcagtctatcattgatgggcatttgggttggttctaagtctttgttagtgtgagtagcgctgcaataaacatatgtgtgcatgtgcttttatggtagaatgatttataatcctttgggtatatacccagtaatgggattggtgggtcaaatggtattaaataatttaggctttgtgggccatgtagtctctgtcacaactactaaactcttgttgtgctatgtacacagccataaaccatttgtatacaaatgagtgagatgatgttctaataagatattacttacagacattgaaatttgtatttcatataatttttatgttccacaaaatactcatctttttattttttctcaaccatttaagaatggttcttaggtcacagaccacacaaaagtaggctctgagtcagatttggcccacagactctagtgtgctgaaccctactctatagagaaactcaggtgtgtaacctaggtagcaacatttgggtggtgcctgaggacacctacagagtaaagcacctggttaatccttgcttctaactctaattctaatggctgaatgcaaaggtactttaagtattatgtacaattgtaaagactcttaagatgatgccttggagggacaatacatattttttatctgttctgatatgtttaaggagaattaatgttttctaaaacaaatcaagtcttcaagtgttttcacatgctaatgatggaaacaggcattataagaaagacatacatggtaaatgtattagtttgggttctctagagaaagtgaaccaatagaacatgtatatttctgtgtgtttgtgtgtctgtgtgtgtatgtgtgcatgtgtgcaaaatcccaagatctgctgctggagacccaggagagccagtgttataaattccagtctgagtctgagtctcaaggcagaagactgatgtcccaactaaagacaggcagaaagagagaggaaaggagagacagagagagagagaattttttcctacttaccttttttaatccattcaagctgctgatggattggttgaggcccactcacgttggaaagagcaatctgtttttctcagtatactgattcaaatgttagtttaattgagaaacgcccccatagatgcaccctaaaataatgtttaaccaaatatccgggtaccctgtggcccagtgaagttgacacataaaattaatcatcacaaaaacaaatgagtttctaagtcagaatgagataattggaaggtctggttactctgaagagtaacattaaattgggaccttcagatgagtgagttaggtagcggagtcattgggggtgttgaaggcaggtaagagaagtttagatgggggagttatatatctttgaatctagtacaatattagagcgtaggaaagatcagaagaagtaccttatttctatctagtaatgtagaaagcccaggaactcttggtgtctctctattatctggccagagtaaagccagctgtaagcaacatatagctgtaagcaacttacagctggctctactatggccaaacagtagagagatgccaatactcaggtattgtaaagagtagatcaccggcgctattcagtttttcaaaaacaagaactctttttaagtaatgagcttcctgcacctttgtacacacttatgccccagtcttatctaaataacatctaagagaaaagaataatccacaagaaaaactttccatctaagccatatttatgtcctgattttatccttcagagcccttgcttcttgaaaaacactccaggaagaagtcatgatgtttttttcacatcattctttccattagattgaggtagggtagacctgtgaccgaccacaggcaagtagtttaaagacttttcatctgcaagctctaacttggtttcactgacctcaagacatgtgtttgagagaccatgaacaaaggatttcatgccaaaaggaggaaacaataaaaagttatctctataacagccttgaaaaatgccaattttttttcaggaatatcactaaaatatacttgcataagaacagttattattgtggaaaaagcaaagcaatttcattgccttggcaccacctctttagcatcaacggaataccctttctccgccacatatttcatgtgctatagtaaaagaaatctactgagattctgggtttacatttgcagtcttcatacaccacatgcacattctgatattctttcatagatgttgtacccattataactcgtgtcccatcacaagaaagtgagttttaattttaaatattttaaatatgaatatcataatttactgttttcatgtagtattaacattgttccttagagcccaggcatataatgtagtttcctgacattatagcagatccatttttaagggtggaaaaaaacccagtatcttcattacttatgaataatttgggccctccagaaatccagctgtgttcccatagaaacctcattggcctagatgtggtgtcatcggccaagaaaagctaaaattcaaccactgtattacaaattgttaattcaagtaaatattgaatcatctaattactgattacagataaaactttccccaattctttaagaagttcagaaaatatccattaaatatgattggtcaataatgaaataccagagtgaggtgggaagtgttggctgaaatggtgaaatttactatttttttaaatgcagcaaacaatttctgaaaatatatcttagtgacaaaactattttaatgatggttataaaagctaagtacaacttgctaaattagttctaatcttatcctaacaacagaaggggcttgtagctattatgttttctagagaaaactcagaggatgccatcataaggcaactttatttttcacaatggctgttatctttaaacttgcattaaagagtaattaataattttcttctaaccttaagtgacagaataagcttgacagcttagataatgaaaagtcctacattcacttcttatcacaagagtctgtgtttcgtaacatgtccagtccggtgtaatagtaagcaactttgtattttgagtaagatgaaagtttctgccttcccttggagagagcctggtaaaatcgagagtcctcagtctgacttggggaggcctttaggcagtttttttccttagacagtaacatctcttcaaccaacaactaacaactactgtttgaaatggaaggaagcagggagaaaagtcaagaaaacataaaaggtcttctttgacagacactggtcagttagtatcaatcctctgtaaagctactaggactcaaagctgacttttctcttggggcactttcatggattctgtggagaccttctccccaccccaaatacaggagatgcatccccttcaaatggttgtttatgtcctccatcatccctgagcatctggatactcttccaatttttctctgctaaattctccttagccctctaggtagcacttgtgggaagacttaagaaaatttctcagccttgtttttcgttttgtatgaccgatatctggtccacgggaatcacagtggctttgagtcatcatgtgtgggagtgcgatcctcttgtttcagctccttcacagacagctccagctttttacctatgagatgtctcagatatggtagctaaaaagattaaggaacgtatcttgagtaatcctgctgttctcttgaagatctctcactagtttaggagaaagaccaggaagataggggaggtaccacagtataataatctccagggaagtcctccctttgatattcagcattctgtggccaattcaactgcaaccgtatcaaactcctgatatgaaggaaagaaaaggatagcaaaactggtttttaaacaacacttttagaagtcttgcacaggctatacttcattttcattttgaagtatgtatttagaatctatttccttgggacttcaatcagaaatataaaatagtttcccattttaacactcaggtatagtagccattaatattcttatttggaaaataaattacattctaataataaattaacaccaaatttaataatgaaaataaatttaagttctgcctaattatgaaactattttatgtgagcactgagtacacttaaataatgggattattagagtatttgtatgttcatcaaaataatagaaattttatgtaattaagttaaattcacttaccaaaacaaatgaatataggatatttttaaaccatgcaatatattagtataaatgagtatggcaaatctgaacaactagataaatttcctttctttgcctacaatgactcaaccagatgtttggcttctgctttgttataacctggaatgcacctttgtttgcttccaaatccctttgtgataactgtgttgtaaatatcctttagagatgagtgtgaaagaatgactctatcctgaaactcaagggcaagttctgcttcatttaagccgatcagtaaagccatttcctagcttcatgattggctaagggatagggataggagacaaaatttggacgaacagggcaaaaggagaaggtcattggtgatttctgggaaaagcacttcctccttctttccagagagcaattcagggagttgctgtctcttcctaatggacatgaactgaggaaaactgtagccctagtgttattttggtaggcatgttgcaatttcaggaaaaatcaacttcaagtgataacaatactgtgagaaacaaaaaagagatgaaaagaaaccagaattttcatgccttttggagtgactgtaataaaactagcccaaagtatgctcttcctttgaactctttagctatctgagcaagtaaactccctttgttcttcaggaaagatgtaatagattttctgttgcttgcatatgaaaccatctggagtaacacaatgcctgctcagaacattatctatgtatcactagcaagctcactattaggagtataattgggtgtgcattatttctaccaaaggcatgtgagtggtcttaattaaaaccgcttctgtatttgtgttctgatcatttatttgctctacaattgatcggtaggtggatggtttgaccaattactgctcatgctgtttcttctacagtcattgttaaaaatgctctaatggacagacttgcaatatgggcacctgtgattctatgctaactttgctgttgatctctgaacacaagtcctagatgattctttttcactcactccccatgctctgccacagtatctgttactgcatttgctcttttcttcaagattgtaccatcgagagacaaagtttaccctcagtaaataggagaactgttcagaactgttcatttgaagaaatacaccctgaggttatatacaaataatcctccagacattttaatagaataagattatctcagtgttttattaattttattatatcatttcactaaatatctatcatttatctatctttagtgcaattatatcaattttatataaaactattgtatataacatataaatatctaaaatatctaaatactcagaaatatctaaaacatacagaaatatatgtagtatataacgtgtgtgtgtatctacacacatacacacacagacatacacgtatttattacacagaaaggcttctgctttctggccccactttcacagtggggtttggggatgaacctacattgacacatcatcaccttaagtctgtaatttacattagggttcactcatggtatacataatttacactagggtttactcttggtatacaatctatgtgttttgacaaatgtataatgacatgtgtccagcattgtagtatcacacagaatagttgcatagcaatattttaaaaatagcatttattggactaattaatctgtctccaatttttgatttgacaaataggaactaagaaatcttagaagagaccttagagatcccatcaatggactatggttctgattcatgaatgcttaatatgctactaatctatcaatgcttcatatggaccaatctcagtaataacagagataccaattaaataaattgcaactatggcttcctatgaaaggaagcagaaacataggcagcctcctttacagaatggggaaatctttttattttgaagggaaagcatataatgcagaaagaagcacaattaaatatccattgcatccaaactgaagtcattgtgtaaatgagttgtgcaccactatttatttatgaaggtattgaacattcattctggcaaaacaatttattcagttttagagggcattattatgagttcattagatttctataatctgcacttcttagagatttttttcttttgttgttgtcaagcgagaccacgattgaaacacttactctcaaagttttctctgacatttatctcttctatggtaaattgtacaaaatgttaaggcctcatatatactacaaagcatttatcaactgttgagtagaaccccaaactagtgctttgtccttctggcatcaccttcagagcccacagttgctgaagaggattgattttgatcagtgttttagtctgttttctttcgctgtaacaaaataccatagactaagtaatttctaaagaaaagaaatttgtttattacagttctggaggacagaatgtcccagagcaggtgctggtgtctggtgagggcctttgtactgcgttatcccatggcagaagagcagaaggacaagcatttgcctgcaaaagaaaggagcaccaggggttaggctcacttttatattataacaacctgttaatgtgataatgaacccattcccaaaataacaaattaatccattcctgaaggctccaccctcatgacctaatcactcctaatgctgttacagtggcaatgaaatttcaacatgattttttgaggggacattcaaaccatagcaaccgggaacctaggtttgtttcttaagcttaattagtgcaatgacagttgtaactctgaaggatataactctccttcaactgacaatgtagataaattgcattatagtaatagtatatgtaagataactcaatcataagtttattgcagtccacaccctgtcaaagactctcttgagatgcttgatatttgacagtctacctcgcatatgaactattgattcctgtagcttctccaattttatctttttatcaattacatcatctataaatgcggcatctaaactttattatctttatgctaattccatactccttgctttattgtgatctgcttactctcctcttcaactccaataaatatctttgtttatagtttctgtctgccaacctaggaaacataatcattatgaaatggtaaaagagatttttagtatgagggtgagggtgtagagagtacataaacatcctttcttttaagcttatccatgttagcctttaaaggaggaaatatgctttagtagcagaaaaaagtcaattctaaaattgtatttatttttaatttttggaaaattgtgttcctatgacactaatgtatagagttagggatggggtttctccatgttggtcaggctggtattgaactcccgacctcaggtgatccgcctgcctcagcctccaaaagtgctgggattacaggcgtgacccaacatgcccggccaaacttgtgacattctgaatagtgttgcacaggttaacttctctgggtaccaatgtcttggtctgtaaaattaaaagggtagctagtggtgattttcatactagatcagtgatttttgtgcctcttggagccatagggaccggaaggagcctcctattagccattaagagagagcagaatagagagggcatgagctggagctgttgtgctgcttaacttcctcaccaccctttcacaaaagtaaccaaagtcacgttaaactttacccactgagtaaactttcttcaggattgtttttgaataagggattcttcaatgtttacaaaaatggaataaaagtctaagaattcttctagagtcccataattctatgaatttatgttttgtcctaaaaatctcttctacattatattcttcaaaaattatgggagtaagcaaaatgttatagggataacacccaaacaaaatagtgtatatttgtaataaaaataactatcatgtactgagtgtttatgctaagacttatatacacacttaatgaataaacccatttagtgctcacaacagacctataagattggcactacaggcattatttctaagatcacataaatatagaaggtaggatttgaacccaggctgacttgctctagagctctaacatttaactacaactatgtatactttctgtctaatataagacattagaagcacaaggcaacatgtcagttgctctcaggagtaaataaaaggacttaattatttgggaaagttatgaaaaaatgcttaaagtgaagctctgtagatcaaatattattggcattgcaagactgaaagtggttgatacattgtttacaacactttgcatacattgttttctactaagctgctgaaaagcaatacataaataaccaaataataaaatttcaagagaatgagaaaacaagttataggctgggagaaaatattaacaaaagacaaatctgataaaggactgttgtccatatacaaagaactctgaaaactcactaataagaaaacaaataacccaattaaaatatgggccaaaggccttcatagtcacctcaccgaagaaggtatacagatggcaaataatcatatgaaaagatgcttctcatcacatttcatcaaagaaatacaaattaaaacaaaaaagagatatcaccacaaacctattagaatggccaaaatccagaacactgacaacacacaatgttggcaaggatgtggaacaacaggaactcccatgttttattggtgggaatgcaaaatggcacagccacttttaaagacaatttggcagttttttacaaaactaaacacactcttaccgtgcaatctagcagtcacactctttggtatttacccaaaagagttgaaaatttatatccacagaaaaacctgcatatggaagtttatagcagctttatttataattaccaaatcttggaagcaatcaagatgtcttttgtagtgaatgaataaactggcacatccagacaatgaaatattattcagtactaaaaagaaataagctatcaagccatcaagacacatgaaggaaacgtaagtgcatatttctaagtgagagatgtcaatctgaaaaaactacatactatataattccaattatttgacattctggaaaaagtaaaactatagagacaataaaaagatgagtgggtaccaagggttgaaggcagggagggatgaacaggaagaacatggaggattcttagggcagtgaaactattctgtatgctactgtaatgttggatacatgtcattaaacatttatccatgcccatacaatgtgcaacactgagagtgaattctaatgtaaactataaacttttggtgattatgatgtgtcaacatatcctcatcagctgtgacacatgtaccactctggtgcgtgatgttaataatggaggaagctaagcacacgtggaggcaaggctatacaggaaatcaccataccttccactcaattttactgaggatgtaacattgctcttaaaatagtctttaaaaaggagtggatttaagggcaacactttaaatgtctttccacagcaatgccaagtcaaattccactgaccggaatttgcagtactatgttgaatatggtgagagtgggcaacttcaccttattcctgatcttaggggaacagataatttcaacaaagagatgaaaactataaaaaatcaaatggaaatgcaagaaatcaaaggcaagatgacagatttagtttttaatgattaaatataatgttagttgtgtcatgtcatatactatatcaggttcaggaagttatcttctgttcctagtttcttgaaagttctttccacggaaatcatcatatctttgtttgttttcttttgtgtgttgatatggtgaattatattgacaaatatctgaatgttaaattagcctttttaattatttcattataccttactttaaccatgatatattattatttgtatatattattggatttttatttgcttataatttattgaggttttacatctatattcatgagggaaataggtctgaaattttgttttcttgtaatacctttgtctattttttctgtaagcgtacatcttagcctcataaagtgaatcagggagtgctgtctcctccactacattctgggaaagttagtgtagaattggtattatttcttaattaaatgtttggtaaaagtcactggtaaagccacctggtcctaaagttttctttctggaagtacatcgcttacacattcaattttttaaatagagattagacaatttaggttatttattggataagctttggcagtttgtgtctttattagtttgttagggctggcataacaaagtaccacacactcgtggattaagcagtgaaaatttattttctcacagttctagaggccagaagtcagagttcaaggtgttgacaaggttgtttcttctgaggcctctcttcttggcttgtagatctatcttctttgtctatccacacatcatcatcccttagtccaggtagtttatgtcataatctccccttgtttttaatttttttaaatttttaacttttgtgggtacatagtagatgcatatatttatatggtacatgagatgttttgatacagacatgcaatgtgaaataatcacctcatggagaatgagatatccattccctcaagcatttatcctttttgttacaaacaatccaattatgctcttttagttatttttaatgtacaattaagttattgttgactgtagtcaccctgttgtgttatcaaataatatgtcttattaattcttctagttttttgtacacgttaaccatccccacctgccctccagccccccaatacccttcccttactagcacactagttatattgcattaaggctcacctatatgagtttattttaccttaattatctctgttaaggccctatctctaaatgtagtcacattctgatgtactgggggttgggactccaacatatgaattttgatgtgacacaattcattccataacagtgtcattcaaggaatttgtctacttcatctaagttgccagaattatgagtatagagctgttcatagcattccttattaaactttcattctgtagagtttagagttgtgcctcttcttttattcttggtggtggtattctgtgtctttcctttcttcttgatcaatggggtcacatatttaccaataatactgtcttttccaagaaacagctcatagtttattttgtctattgtttttctgctctcaatgtcattgacttctgattttatctaaattatcttcttctgtctaattgccctgggttcagttttctcttgttatattttcttaagcctgaaacttagatcactgatttgtaatctttttaaatatggatacttaatgccacaaatagccctctaagcattgctttagctgcatccagtagtatgctaggttcaacttatactggctcatgagagctaattgtggagtctctgcccaactccattttctgtgatgtcaatcatgatggaaacatttacaacatgaaaactggcaaatgctacaaatctgtatcttttttttcccagagagctgactgttgaacatttactatgacggtgttctcatatgtcctattaattttggtagatcatgttttcatttttacttaagccaaaatattttctcatttctcttttgatttcctctttggctcatgagttatttaaaagggtgttgtttaatttggacatatttgaacatttccccagatatccttctgttactaatttctagtttattttactcataatccaaatacatactttgtgtaatttcaatttttaaaaatgtgttaggatttgtttgtaattaaaatatagtttacttatagtctagagtgttccatgtgcatttgaaataataatatatcaaactatagttagacggaataaaaatatctgttagaccaagctaggtcagagtgtggtttagctttctatatcttttaagttttctttttatttgttctatcaattactaagaaaagagggttgaagaattcaactatgggcataaatttgttaatttctcctttcaattttaaaaagtttttgctttatacattataaggttctattattagatccatacacatatagcattgttatatcttccttatggattaatccctttatcattatgtaatattttatatttcatttgtttagtaattgttttcaaggttcatttatgttatagttgtacttgatttctttttatggctgaatattatttcacattttgtttattcagtaatccattgattggcattttggttgatttaactttttattttttttacttttaacctgtttctttcatactttaagtgagtatctttcaggtagcatataacagcatacaagtgtatcttccttttacatattctggcactctctttccttttaattagtttattttcatcatattaattatggtataattgtattaacatttgttgtcttcttagatgctttcctatttgttatatatgtttctatttctcttatttctttgggattgggttttcaatgattcatttgtctttatgattgccttattatttatatctgtctgaatttttttttagtggttgccattgggtttataatgctcatctttaatgaaaatatgccttccaataattttatactacttcatattcagtgtaaggacataataacaggaaacttccacttctttcctctcatattttgtgtcatatttctcataaatttcttctgacatattttataaattcattgcaactatgtttgcttgtgacaattatcttttagaaaaactaaaataagaaaaaaatgaattttatgtttatcttgattactaggtgttttttgagacagggtctcactctgtcacccaggctggagtgcagtggtaccatctcaactcaccacaacttctgcctcccaggctcaagcaattctcatgcctcagcctcccaagcagctgagactacaagcatgggccaccacgccggactaattttttgcattttaaggagagacatggttttgccatattggtcaggctagtcttgagctcaggcaatcttcctacctcagtctccaaaagtactaggattacaggagtgagccactgcccctggccatttatccaaatttctttttgtcatcatattcctctgcctaaagaacttcctctaacattgtagtgcaggtctgctggcaatgaattctctctctctccctctctttctctcattctttaattttccattgtatttttgaaaaatattttcacagggcataaaattctcacttgaccatttttttgtctttcgacagtttaaagatgtcactctattgtattctggattgtaaaatttatgataaaaatgtttttgttattcctatctttgttcctctagatgtaatatattttattttctggttgtgtttgatttttcagaagttcaaatatgatatgtccaaggatttgtgtgtgtattatgtgctcattcctgttgttagtctctgagcttattgtatttgtgacttcatggataaaaaattctctgccataataccctcaaatttcatttgttactttattttctccctccaagatttcaattatgcatgttaggttgtttggtgtttttttcacagattttgaatattctgtttttttcttccttgtgttcagtttgattgacttttatcctttatctccaattttacaattttaccttcaatttcacttcagttttcagtctaatgatgagccatcaaagacattttcatctctgttaccgtgtgtgtgtgtgtgtgtgtgtgtgtgtgtgtgtgtgtgtgtgtttcggtggtggtgttagcattttcacttgatttcttccttatagtttcatctctttgatgaaatgatctatctgatcatgtctgttgtccacctttttcactagagccctttacatatgtatcatcattaaattaatcttcctgttggatagtgacaacatctgggtcatgtctgtgtctggttgttattttttcttgcttccttgtgtgccttatactttttgttgaaagatatgccatttttggtaagaaatgcagagaagtagcatttttgcttggaaatgggtttgccttgtttttaggcaggcctttattaatatgagttatgtcattcctgtttggagttggacagaatataggcttctaattcttccaaagcagtcctctgtaatagaaatataatacatggtagatacatgattttaagtttttagtagtgttgttttcaaaagtaaaataaaaatgcaacatatccaaaatactgtcattatgacatgcagctctactcacatttcaagtactgaatagccacatgtggtttgtgactataatattggaccacaaaatttgagtattttctgttttagaatggaggttcgtttgctagagagttgttctcaatggtttttccaccatcacctttaggttttcttttaatacctgtccttggagaagtgttcgttctacatttttgacattcccctaggagtacactgctgttacttgtttctctgtgactggtggtaggcactaggggaacattctctggtattctggtctagcttcattcttaggcaatcactttgtctgcatctcagggatagagccttctcaagggttcttcttctcccttcaataggctgggcccagtatatatttcttttcctccacaagggtgagggaatttttgttgttgttgttgttcccttccctcaacatcactgggtcattatctgcaccttaaggatgatgatattttcttcattttccagagtcttaaggtatttgtcatggagagataggagagaaggatccaggtaggccttcatgcctttcttgcagggctgctgttctgttcctacaggcccaatagagacattctcaagattttcaccctgcccccagtcaagtgtggtggcatccagtgaggtttgtgaagagtctggaagtgggtcaaactccccaagtgtttttggttcccaagggctgtatgatgtcacaagagttcacacttcacctttagcaagctgctcaattttagtaaaatttgtctcactggcttgaaccgcactgggtgtctagcatctgccttggctcatcagaggctagtgtgctctttagaaacacttgtttttccttagatttgaggttagttggttgctttgtgactcagctatctagtagattcaagaaccattgtgatttttgcagattttcctatatatttttttaaacttaaaggggaaagttacactactttcagctttctgtatagcaggaggaaatgggaattccttgatgcttatttttgataagtataactctcctattcccaaggaatctctcatgcattttgctgaaaatcatggatatgcagaaagtaaagcctagctttcaaaggattccttaagtcatagtttattatgctttgctgtattaagaaacaatgtgcttttgtttgtttttcaaatataaattatttgtaaaatatttttacaaatagttatttgtaaaatatttttacaaatagttatttgtaaaatatttttatgaataattgtttatttataaaataattgtttaacaaataagaatatttgttaaatattcttttttatctcatactttctccttcagagaagctgatatccagataaaaggaggactgtcccttaccccacttccagatatattagaaatcaatgatacagacatttctttgtgactggagaaatgagagtttgatcagtgtcattggtgaacaagcacagtaagaccaagcagtgtcaatctttgtatcctcttagacatctgaagtcatgccatctgatagggtgacttatgattgggtattcagggttgatccaatttcattgttttacaagggcgtaagtacagactacgtactcaagatttatgtagccagctatgctgggtgctgaacataaatgtttgaaaagtatttggacaaattgtttctaatctgacacatttcacctccaggtattggttgttgcaatgacccctggttacaaatcacagctgctaactaatgggcactatgagcctgtggcttcactgacaccatcattttttgtatgtattttatgttgtttttgctggagtgtgcgtgacaagttagatccaatctgtctgctcagcaacaagcaaaacgaaaaacacaacgtaggaaatattgttcacatttccaagattgttttctatcatttggttttactaatatgctaacattcagaactgataaataaatgaaaaatggataggaccttgaaaatggatgatttttatgataactataagctgacagcattatttttaagtggacagttgtttgcattcacattggttattcattttatatttaattcactcacctctctccaaaaggttccaatgctgtgaaataaattagctgtcacattttacaccagtaggtagtagaggagctgcctccctttctggagctgggttttatagaaagaggtggacatgtgatatgactggtattttgtttcattatctaaaaaatttttttagaaatgaagaaaaagggtacgtacccttcagtagacagtgttcttcccactacagttgctgacattttgtggaagactttctctgtaagttagaggtgaatttctgtgaattgtatatccttaattattcctgttgggaggtgtaactttttctttttccctatgactgccaaatcccttttccacagtggtacagctgtgcttgggagatgctctgtttgtttctttaagttgaagtgaagtggacagatttatgattttaatgaaatatcttaagcacaggaaatatgcatttaacacattttatgctctttccctaatatgcacccttgcctctcccacttttcacaaaactccttgtaaatagaaggttaagcctaaaaaatatgcccaataagtgcacattgcattaatagttcagttcacgtgagtataggaaactctgctaatgataacatttgactatgagattcttccttaaccttcatacctttccaaaaaccttctaagtttgactccagagaatgcaagaactaaaatatcatgccattcttctacaaaagacttataaatactcaccattgtggctgttattaatattctttcgttttaaagagaaaggtatcagctcctctcatttcagaacaaataacacaactgtaaaagctgttgccaagcaacctgaattcacagctcagatgggctgaattgtttatatccgtatgtggataaaactgacccactccttctctaaaaaatgtatctacgaagtctttgagatatttccactaatattttaggctgtaggtcatggcattactattctgtaggaagttctgaaattaacacacacactatctacactgtggcattgcaattgccatattacattataactatctggtttggggtctgtttccccattgaactgtgagttccttgcgggcaagtattgtgttctactcatcatacaggcaggttctttatacatagccaggacttcatcagtgtttgacggatgcatgaaaaaaaatgattttatgccagtgtctgtgctgtacactttctacaaaaatattttcttactagaacctgaaagaaagaaggaaactgttcaatttaaaaatctaccaatatgaaattataataagcacaaactgaagcattcaggtaaaaatattagaattataaacacattttagaattaaaagaaactttgtgggacatttaatctaatggttctcatcagaatcacacctggaacttataacttttgagtgacagtttgaaatgaggtatcctttttttaaagttccccccggagattcaggaaccgaattatcactgatgtagtccaacagtctccatttgtggtggagaaaatggccgcagaggagtgagaaccacgaggtcatgagaagagcacaagctcttgggtcacctgcctatcaagtgctgtctgactgtagccatctgttcctcactgtccataaaatggaaataatacttacttgtgagatgtctggggaaacttaatgatatgacctgagtagtgccttagaaccatgctggtgggaacctggcaaggaccatctcttcccttcacaatatcctctgagttgcaaacacgttgtgaagagaacctttgttggctgacttccaaacacttcagggccatgtagaaccgtacaggatacctctggctccgacgttttgactggaaaggagcaagcattaatcatatctgtcaggatccctgcagaatactcatgaggcatcacccaaaagggtaaattaagagtgttaataaaagactcttttcaaaggtgtggagaggttaagggaaccaccgagaaactgtgaggcaaggcagggttaccagaccaaggggtcagagtggttactggaaactggtactatctgtggctgcaagaaatggattcctggcaggagctgaatccaaatgagaggaacagagctactggccagactgcagcctggcaggaagggagccaggaaaagaatctccctctcctcctactctctgattttctactggcagtcacattggctaagttagagaaggaggatgcccatccaaagcaattctaagggtcaatctttggtgacacagagcaggatgaagaaggatggagaaggctctggaagggaaaatagaagatatctaggcaatttccagtcttctactttatgctgggtactttttaagcaggatgtctttacaacacgttttcctttgaggcttattcagttgaatataaattacctaaaaatgactgacattgtggtacagtcttccttgccaggaatttacatgtatacctactaactctaccatgaataaatgttcctaggcaatgaaaccaaaacttgactactgaatgtgggtcccctggagaagagacacagttttcaactgaacacaaggcccctttgttggagtagattcaggagggaaaccagcctgcagggtctacttgccagggatgcagaataaccaaaatctatgcctgcctcagcagctgccggattttcctgagccttctgttcaccactttattttcaaatttatccatctaagaaatgagaagaacacctgtgcctcattacacgattgagatttttgagggaaatgaggatcattcttatggaggaaagatactgtctacttaaatgcaaagttgaagagggaggcattctgctggtgctaattttcttcaacaaatgagacatgtataagataccggatgctttgttacctttactaaacctttcttgggaacctggagactgagagatgaataaggttgcctctacctttgaggagttcatggtcttgtggaaggaatcagaaatgaaacatttcttaaaagggaataatattgaattgaagatcttggtattcttttgtaatattttcctgcatttattttatttaatgatacatgtatttatttttgtaaatgatggtctccatacactcagcacttcacatgcattggggttgccaagcagtccctcttggctccactcttccctggcaattccctcccttaggttcccaaggttcactaactgtttaatatccatgccttggttcatttctgacactacttgattctccaccagctttcagccttgttctgaataatttatcctaactcagttttttattcttttatgttatatttctgtaagagccctactcagtatcttcatccccatttccacttggcagaagagagattttatatagagattttatatagtggttttataaacctataaaatacctactgggcacctgcagatagtaaatattctgttactcttttctttttgtccagtggtgaaggtttctgactgttcagtaaccaggatgttaggaccaataaccagggaagccttaggcttctaaaagtttagttatgaagtatcttacagcaatatcaaaaggacacaaggacctgtttattgacttgaatgtgagctggggctgaaaaggaatagtattccaaggagcagcatgtgtaaaggctcagagtcaggaatgggcaagctgtgttcaggagcacagtgacagtatcaccctatatggggttaagagctccaggtgagatgtgattacaccacctacaatgtatagtgtgactaccatgtgtctagagctttgccagattgtttacatatatgagctctaatcctcacagcacagaaacctgtgtcacacagctagcaagcagtagagccctcttcaatactcagctctgtctgctttcaaagcccaaaattacaccatggcagtttgctgccttatttcctaagtaatataggattgatgaaggaggaccagatgttgaggattttcgagaaccagaaacagagtatggaaaagacctggtagactttagacaccaatcttcctgtgaataatttatggaagaatattttctaaaatgatcacatgccacccacccagattctcaaatggttaaacattttccagttttttgactttgaaaatacttttcaatcagcttctataaagccagttgcatgaaattcctgtgctctgtcgacacccttctgaatctggtcattacttttctctattcattacctgagaggtagtagggaaaatacagaaaatgaacagtgggtagcttccaccgtacctccatctatattgcaagctctttgttgtaatgccgctctatctgaaggcctagaatattttcccttttccatttcccctcctctttaaaaaagaattttacagcacaccagacatgagagactttgtaatgattccatctgagatatagaaattgcttaacatagggaagtgaatgcttgtggattcatgttagcattctttatctatggagaatacgtatgctactgtgtgtgtgttatttaggttaagctataacccatgtacttcaagcattctaatcagttatgcttagtcccagagaggtcacctgacctttaattaagtaagccagaggcagcagcaacaaacctttcagcaatccagatcttaacacaggaaccttggctaaaagacatattgaatgcaagccatgaatttatattagtgaaactgttgtcttaattagcatgaagagtgtcataagtggcctttcatcagtgaaataaaatgtattcacaatatacacatcagctaaaatatgttaaagatgctctaaatagggtttaagtatctagtaatgtctgtagtcaggacctcaagaaagttcctgtactcagttcctaagtggtactctgtccagccattactttaggagtgtttctgttttcttaatggaaaccagaggagtaacagaatcctatctctggaatgttcttgtgtctgccttgagtaattctttcatgccagaattatagaatagtcagagcacctaaaaatgacgagaatgggggcttcttttacagaatacaatgtaagaacagttctgccttcttcgttattgggggtgattttcaaaggggagggagtgtacgaatagggtgtgggtcacagagatcacatgcttcataaggtaataaaatatcacaaggcaaatggaggcagggcgagatcacaggactggggtgaaattaaaaatgctaatgaagttgcatgttccactgggcacgcatcgtcattgataacatcttatcaggagacagggtttgagagcagacaactggtctgaccaaaatttattaggtgggaatgtcctcatcctaataagcctgggagcactacgggagactggggcttatttcatcccttatctacatccgtataagacagacattcccagagcagccatttcagagacctcctgctaggaacacactctctttctccaggctgttctttgctgagaaaaagaattcagcgatatttctcctatttgcttttgaaagaagagaaatatggttctgttctgcctggctctcaggcagccagacctaatggttatctcccttgttccctgaacatagctgttatcctgttcttttttcaaggtgcccagatttcatattgtttaaacacacatgagttatgaacaatttgtgcagttaacacaatcatcacagggtcctatggtgacatacatcctcagcttatgaagatgacaggattaagagattaaagtaaagacaggcataggaaatcacaagagtattgattagggaagtgataaatgtccatgaaatcttcacaatttatgttcagagattgcagtaaagatagatgtaaaaaattataaaagtattaatttggggaactaataaatgtccatgaaatcttcacaatttatgttcttctgccatggcttcagccagtccctccatttggggtccctgacttccattaacacttcgtagtaaaagtctgttcagtaaatgtctaggtgtttggcagagggaggtaaccctcaaacacctcagattttgggggtacactgttacaaataaaaagaaccaaaaagttgttcaatcagttggcaacagttacctttccttctattccagctacttcattggctaggcagggttttggggtagcctacgaatcagaccagtactgataaattcttatagatatatttgttttaagtgctagttaaccgtgtgtaatagaagttttgtgtcaaactccttgctaggttggagacagcccatagtagcaaattttttatttcctagcaacccctaatagtcctgattagcaagctctcatttatttactcagtttgggaaatagagcaaaccagacatgcagccgtgaattcactaatcgttctgtactgtggccatcagcaaacctttgggtagttctcagctactgctgataattcagaatagagcagttagctattgcaaatttgatgactgtgcctgttttgccacttctgttctcaacttaattgatagttgctgcctttattatgaattattaacaataagagtgaattttgttgtttggtaaagtgataaattgttcttttgttctcaaggttaattgcagtccctatgccctgtttacactttaacgactcccaatgggagcaagcaaacaaacaattgaaaatataaatttaattgtatagaaatgtagcataaaataaagataaaaaattcatttgtgttcaggggcaagaatggtgatataaatgttcaagacataggtttaagctcatacaaaaaagtaggaagtgtggcagcaacaaaaatcatttctacttcttttcttcctgaactgttcaagtacaaacagtctctgggctcaacaattataccaggcaaaacattaggcatgaaattgatgttttctaaaatttcaaggtttctacgaataaacaccttgataaagaaatgaatattctatgtgcttaaaaatacttatcataattactatttattgatactgttaccaaaagtgatgcaaagattgaaataggtggttttaaaagtcaaggacagatgatcagattttatacaggttgagataattatagcaagattataaagagtagttaagtattcaaaacctccattttcccaccacaaacatatagtgaatacattcattttctcagagtgcctacacttcataatttcaagattaatgctcatatgacaattattcattatagttaaaagtaaaatattattgagaaccctctaaggaacaaaattcttttctaatagctataaaccaactgtttaaatcttacaagaaagaactttcattttcaactgtctattatttgtggtcttagtgtctttcaaaggatgtgacttgtgaatatttctcttagcaatacaataagatagaatggctattttattaaattgtgttctacaagccctgtttcaatagcataacttgtctcaatcttccacagttcctgctgttaaaaatatgtagcttctgatgtacactcttattctaaatatagataaattaaatgatgcttataaattttaaattctacaaatattagagtcaacaacaacaaatgaacagggctgtctctttgtgctgtctctttgtgcttgaagtcttggcctgtaacattccaggaggaaattctcgatcactagcagttatactccagagagcaggcatttggacaaatttgccttcaacaacttagcaacagatgagtctgtacctactgctcagatgacactgccagggcttgaccagagtactttgctgtagatgagagctttggtgacagattcttttgattggaaagttggtaagattcctagatcaggctgctatggaggggcagggctcaatggggaccttgccagccaggtgaggtggctgatggctctttgtaatagctttggaaggtacagctaatgatctgtaggagtcagtctatggatgtacactctcagcaagagaagatcaaaggctagattatgctgagagccaagggttaagtactatttattaatagctataccttgaacagaatccacagaaaggtcagagactctcactgagagtgggaagttcaccatgttctatcacagtctgtttcatatctgctatttctagagaaatgtgtcatctaaaatgcaatgcaataaaacaatgcagactttgcattatttttttaaatccaatacatgaaataggtatctggataatagcaggttcttgatacatattgtactttgatgaaaccagatatattaacagagactcttttggttccaagttataaaagtttttgagctaacaggtgaaaatggtgaatttacaaggtatctggataataataggttcttgatatacattgtagtttgatgaaaccagttatattaagggagtctcttttggatccaagttatacaaacctatttgagctaactgaggtgaaaatggtgaatttataatatgggggaaggccacattcaggaatcaggaaaataactggtatgagggacatcagtatcaataggatgttctcacattcctgctcccatgcaatatacttccctctctctgtaggccagtttctcttcttcttcagtccacaaggtgtaacacacggccctcagtaggcagccgtgtttacatgagacaggtagggtcaatctgctgctgagaaaagattactttctcagtcctcattctaaattctctggggagggaggctgtgtgttacatcttgggatcaaatacccatctgtggggccacttatctggcaagggtcatatatcattagtgacctggctgccactaacctagtgatacagctgcatggtacaaggagcggggaggcagcttttagaaaaaggcaagtgaaacaacttgaaaataagtagcctgctactttagaggaatcaatgttaaagcagtttaagagatgtacatatggccgggtgcagcagctcatgcctgtaatcccagcactttgggaggctgaggcgagtggatcacttgaggtaaggagttcaagaccagcctggccaacatggtgaaaccctgactctagtaaagatacaaaaatattagtcgagcatgatggggcacgcctgtaatcccagctacttgggaggctaaggcaggagaatcattaggacccgggaggtggagattgcagtgagccaagattgtgccactgctccctagcctgggtgacaaagcaagactccatctcaaaaaaaaaaaaaaaaggaaatgtgtgtggtgtgtgtgtgtgtgtgtgtgtgtgtatatatatatatataaaattacatattatatgtaatataaccatgtaacaatatatactaatatatattataatatgttacagtatgctatatcactaatatagtatatataatatatacatatatgataaaatcagcctacattttagagcctcatcaagttgtactaagaatgaaagaacctctattagatgtttccctaggaatcttttgttggatgctgggtcttaagaattgggaaggatgctctgttctgggggaaatactagatctttagacaaaagctttctgcttagtaagccttcctcctttgcttcctcccttcctttctccctcccttccttttcttctttcgttcctacagaagcaacccataccagtgtagctgctttcattataaaaagccctattgtgataagcccttaggcatggtgaatgagaagagttacaaagatacaagaaaagctgtataaattactgtcaagataggtggattggattgtgatatggtttggctctgtgtcccacccaaaccttatctcaaattgtaatgtccatttatcgagggagggacctagtaggaggtgattgcatcatggaggtggtttctcccatgctgttctcgtgatagtgagggagttctcatgagatctggttatttgataagtgtctggcactccttgccccactgctgccatgtaaagaaggtccttgcttcccctttgccttctgccatgattgtaaatttcctgaggcctccccagccatgcagcactgtgagtcaattaaacctcttctgtttataacttacccagtctcaggtagtagccttatagcagtgtgaaaatggactaatacaaagaattggtacaaggagtgaggtaaaatgtggaagcaactttggaactgggtaacaggcagagattgaaacagtttggaggactcagaacacaagaagatgtgagaaagtttgaaacttcctagagacttgttgaatggttttgaccaaaatgctgatagtgagatggacaacaaagtccaggtggagatggtctcagatggagatgaggaacttattgggaactagagcaaaagtcactcttgctatgctttagcaaagaaattttcagcatttttcccctgccctagagatctgtggaactttgaacttgagagagatgatttagggtatctggcagaagaaatttctaagcaacaaagcattcaagatgtgacctggcttattctgaaagcattcagttacatgcattcacaagaaaatgggttgaaattagaacttatgtttgagaaggaagcagagcataaagatttataaaatttgcagcctgaccatgtggtagaaaataaaaccccattttctggggaggaatttaagcctgctgcagaaatattcctaagtaatgaggagctgcatgttaatagccaagacaatggggaaaatgtctccagggcatgtcacagaccttcacatcagcctctcccattacaagtctagaggtctaggagggaaaaatggcttcatgggatgggcccatgaccctgctactctgtgcagctttggaacttggtgtcccgcatccccgcggttccagctcaaacagtggctaaaaggggccaaggtacagctcagctgtagcttcagagcatgcaggccacaagccttggttgtgtccatgtggttttgggcctatgggtgcacagaaaacatgaattgtggtttgggaacttgcctagatttcagaggatatatggaaatacctggatgcccaggaagaagtctaccgcaggggtggggcagagacctcatggagaacctctactaggacaatatagagggaaaatgtggggttggagcccccatacagagttcccactggggtactgcctagtggagctgtgagaagagggccaccatcctccagaccccaaaatggtagctccactgacagcttgcaccatgcacctggaaaagccggaagcactcaatgccagcccatgaaagcagccagggggtgggttgagagggctataccctgcagagccacaggggtggaacatcccaagggcttgggagcccaccccttgcattagtgtgtcctgctgacatggagtcaaaggagattattttggagctttaagatttaatgactgctccaccaggtttcagacttgcttggagcctgtgccacctttgttttggccaatttctctcatttggaatgggaacatttacccaatgcctgtactcccattgtatcttggaagtaactaacttgtttttgattttataggcgcataggtggaaggggccttgtcataggtgagactttggacttgaatttttgagttcatgctggaatgagttaagactttaggggactgttgggaaggcatgattggctttgaaatgtgaaaaggacatgggatttgggaagggccaggggtagaatagtattgtttggctctgtgctgccacccacatctcatctcaaattgcaatcaccataatccttacatgtcaagggaggaacctagtgggaggtgaccagatcatggggacagtttctcccatgctgttttcatgatagtgagtgagttctcataagatctggttgtttgataaatgtctggtgcttccccactaaccatccttccatgatgtgaagaaggtccttgcttcctctttgccttccaccatgattgtaggtttcctgaggccaccccagccatgcagaactgtgactcaattaaacctcttttgtttataaattggtcctaattgtattagtgtgttttcacactgctataaagatactacctactcaggatacttctttttacagaggagaaaactgagtcacagataagtaaaacagcttgaccagcatcatatggtgaagccaggattggacccagtgagtctggtcccagagcccattctattatgaaccccataccttttcagtgtaggtacagtggcatgataataatgtagctgacagatttaagggtatattactggaaatgtttaaataaatcagaactataaaattacataaaggtgagaaaaattacaccataatttcctgtacttcctttggttctaaggtgacagatgggactattttagcaagacaaatgtcttaaagaacttcgaggtttctgacattttagttttcagtccagatgcaatcctttgattaatgaagttctggttttagtttccctaattttcaggcttacacataaggtccttggaagaatatacaataagcctaagtgaaaacgttagtggccatctatctctttctaaatgggaccatttaaatgattgcagacagataattgcctacattaaaaccataaaatatgttatgaaactcccttctttggtcctcttacaatcaggcatcttaaatactgactccatgtctattatcccttctttctcccactctaatttaattggtgtaagttcctaaagcttcatcagaaaaataccttccaaattttcccagtcctctttcatagtgcttttctaaccccaaggtccttttatgtttgtccttgcattcattccattttcagacatcagtgccacattcacaaatcagcagacctagagaaagtagatcatatattattccattttgaattatttgtgacctaaaatttaaatattagaagtgaggggcagccttgctatatatatctggcaggtcctacttgaaactaccttaggccaaaagcagcagatgctgtgtttcacagttgttcagaagcatggcatttaagtaaagacaccttgtccatctaatctcttctcagcatttgacttgggcgcacggataagggcagatttgtgagtatgatcctcataaatcaactccaaccatatcccttatttacttctgtcccttcaatggcttcctatctcattcaaagctcatgcccagatcctctgtgacctcgtctccactgatggcatctttcaaccttgaatcaattactctttcttgattttgcccagcacattcttaccaggatgcctttgacattgtacttctctctgcctgaattgctcttcctcatatatttccagggctcatgccttcacctccttcatggatttttctcaaatacatctcagtgaagctttccctgaccaccttcatagaattgtaaccctctgtcctgacacttccttacatccctctttttccttctaagaagttatcactatctaacattttatatattttacttatttttccttattagtttgctgtcaagaattagatatttttgttcattttattcactggtaaagtgaaaaaaggctagaaaagtgccttgaaaagagtaagcagcaaaatatttgttgactaaataaacaagcaaagattatacatgcaaaaaacagaggtaataaataagggtttgattcactttttaataatgtttgaaaaatatttggggagacttcctgagggaggtgacatcaaaactagggttttaaggataaattaggctgggtgtggtggctcacgcctgtaatcccagcactttgggaggtcaaggcgggtggatcaattaaggtcaggagttcaagaccagcctggccaacatggtgaaactctatctctactaaaaatagaaaattagccaggcatggtggtgggtgctgaggcaggagaattgtttgaacccgggaggcagaggttgcagtgagagctgagatcccgacactgcactacagcctgggcgacagagcaaacctccaactcaaaaaactaacaattttaaaaaaggataaattagagttttagagttttccagcaggacaagttagaagtggaaattttacgtagttgaaaaaacatgtgcaaaagcactgatacaaaactatatggtgcatttagaataccttaagtttaaaaatattgataaattggttgggcgcagtggctcacatctgtaatcccagcactttggggggccgaggcaggcagatcatgaggttaagagatcgagaccatcctggccaacatgatgaaactctgtctctactaaaaatacaaaaattagctgggcgtggtggcgtgtgcttgtagtcccagctactcaggaggctgaggcaacagaatcacttgaacccgggaggcagaggttgcagtgagctgagattgtgacactgtgctccagcctggtgacagagcgaatctccatctcaaaaaaaaaattgataaattgtatgatattaaaataaaaatattagaatttattatttaaatcgtggaaagtgcattgggagttttaagcatgagtgatagagaattatgctctgttctgcttttataaagatccttcggcagcaatatgaagcataaatttgcagaaattgaggatttgtttagagatttaagttaaaagcattagcaacagtccaggcttcagtagatgaggactgtactataggatggagggacagggatggtaacaaaagaattaacattataaatgattgattgaatgattttctgtgaatatgtgcgtgttttggggggagatttagaggagtgaaggagctgaattttattgttgatgaaaaatggggttgttcagctgaattactcagtttatttcttattcgttaacattgatgtatgtcttggggtaactcctaagccgttcacattcattttatatatcttaagagttccagaactctggtttattggttagggaatgcaattagtaggatagacctttgtttcttaaaatcaatgaaaagatcagcagaacaccctaagctgtatttttttctcaaggtgcataatctgaagaccttgtgtaaaatctcgactcctgaactttttcctgaagtgaacagaaaattgttgattttagttcactcaaacaaaataagaactattcactgacaaatcttctgcataacattattctgtatgtgaaatacatggctgtctgctattggcagctcagtgtgcattgttcagtagaaaagacataaactttgagtcacagggatacaggctaaatcccatacctgtgagataatctttggcaaaattaccaggccaccatgaatcttacttttctcttcataagacaatattttactttttttttttgaaaaccctacatcccaggatagttatgaggtttaaactagatagtgtgtatgtataagtttgagggtcctttgattctgagtataaacaactttggctaattaggaaaataggatttattggaaggaaatcaggacttaaattattgacatgaagccagagaatgggcagaaacgacggcagcaagaatcacagaaacagtctcatagctgaaacaaactggtctggatgccactgcaagaaagagtgtgtgctagctgttcctgtttttcctctttatgtgacctgcttgagactcagtcccaggagagagtatcaaattggcagatttgaccccttccagcttccacactggaaggaaggccctggggtttccatcccagcaagactctagacgttcagacagaaataattctgcaaaaggaaattgggatgctgagaaggaagaatggattcttgctagacaaaaacatgaaagtgatgcctttaaagtgatttattaaattgatgacttttgacgtgttttgatcacaatccacagcaagaaatgcattttacatcatgacctaggagtcacatatgtatatgcatgtttgtatttctttataaccaagaaagatgtttcttttcttaccaagcttattcttaccatatatgttgctctgttttgttctattttattctatttcactttttaacagcccagtcatgccccactaaattgatttcataacttatgaatggtttacaatctacaggctgaacacattttgttataatgtatataatattagtacattgtaccaaatattagcaaactgtaaatatcagttcttatatcatcttccccctttattttgcctcccactctcccatgaaataaaatcacagtcagtgactgaatgaccaagatatctgcagcctctctcattttattggctgatggcatagttttagtcatagtttcctgaagaatagagttgtatcaatttcataacttttaagagatgtggcatataaataaaaacggtatgaataaagaaatagtaaaatgaagaatgtgagataacttaagcctcagcaaaactacaaccgccttcttgaaatatcatagttttctgctctgcacacaaacatctgctgttgctccctgaaatgagattcctgaggctaagcacaccttttcttaatcttgactgtattgaaaaacctatttggatatttttggtacaaacatatattttggcctaagatgttgagttaattggtttagaggtttgaggcttgaattaatgaaataattgactcaattctttattttttattttagttagtctttcaccaaagcattattagactcataatacatttgaccaaagatcttcaatctaatataattggataatttactgtaattatttcatttttaatgatcccctatcccatttcctaggagaactgtggcaatctctctcttcaaacctttagtgcttgatctatccttatcaaaccaggggatgatttccctaacttgcatttgaagccttcctccctgagatttctctttagaatccctcaaattttaaggtgtatcatttctcctgtgtctggatctcattccttttggcatctcctggtagccaagttcttgaatttgtcctctttcattttcttcttcaaaccagccttctctactggcgaaatcatctctttttacaaatgttctctgatgccctaacaaactatctgaacacgattgctcaactttcctgttcccacaagctaccattccataactccatctttcttcacacgctacatttttttaaagtactgtatgtacattttgcttccatttcatactatccactcattcctgtgtctctaatcaagcattcactcttcaatctactaaaactcttccctgagtctctcatgacaatatccaagatgtgtatttgtttcagttggtttccttgttgtgacactattctggtgctttgactcaagctgtatcctaaccagtaggcatttcccaaagccctctgctgaccaaccttctttttggtagaggggcgagatacacttacatctactggctcggatacagcttgagtcgaagagaataggcaaataatttaactttggttcaatctgggatctgccactgtgagctatgccatcttgcctaattgtcctacccttctcagcactgtataatggaaataatagagcccatatcctagggtcttctgaatgttaaatgagaaaatattggtaaagtgcttagagagtccttggctggttttcagtgtcagttatcattttcccaccagggaaacagaggcccttctgttgcagatggaagaacacatttttcaaattcatgaagagtgagttcctccactataccaccctaggcctctatctggcccttcactcctcccccagtgtgtctggggaaagagtcctcctatgtagcttaactccttccatcttcctttttctccactctcctcctttatgcccgaaattttgtagaggacactgtgtatgataagtttatctaaggctagggctctatattaggaagttgattgtgttgcactcctaagccatcatcttcagcacttttggattcatctgccatctcctttatctatttcagttgatgaagaatttgagcagagaaaaaagggtggtgaccctgtggaccttctcaaaccccaacacttactgatatttttcccctactccattggattctcaactccaggctttctctactgtggtccgtcctatacaatgctgcttgtcatcttcctaaagtcctcacgaaattgtttcctttacaaccagaaaagctgctccctgttatttacacaattgcgtgtggatttcccaggggtgttcatggccctctactgcaacgtctaatttccccactgctgcttttgtgttactccatgctccagatgagctagatgttttcctgaacagcacataagttttctgcctctgtgttttgttttatgccattttttccacctaaagaatagtctctcatccttctttattttttgaaattctggaacttaagtccatctcttctgctatcatcttttcagtaaaggccttctctatccccattctgatataattaattcgttcattagcatgtatttttcaattctcttacggcatgtagacacatataagtgtatatataggcatccttattttaaaatttataatgggactggttttcaccttatacaatcagatcataacctgtttaaggacaggaaatacagcctcttgtttttaagccccatagtggctgtgtagcattgagtatttagcagggagtcctgtagttaatgagtgctcattaagtcactaagtattttatgatttaaattgaaatgagtagtcagtgtattattcagtattctccagcaaaacaaaactagtagaacacatacctacctatatgtgtgtgcgtatgtgtgtgtctgtctgtgtaatatgtgtgtatatatatatatatgtataatttatatgtgtgtacatatatatattacatataatttcttataaagaattgacttacgtaattataaaagttaagaagttccatgttccgctatctacgagctggatacccaagaaagctggcagtatagttctgagaaccagatgagggcaggagaagactcgtgaaccagctcaagcattcaggtgaagacagcaaatttcccctttcatctttttttttgattcaggctctcaatggattgcaggatgcctacccacattggggagcaatctgcctactgattcccctgattcaaatgcaaattttattgggaaacactcttcagagagacatgcagaaataatgtttaatccgagcacctcatgtcccagtcaagttgacacataaaattaaccaacacatccaggatacacacggaacacactttccatccgtttgttcttccgtaaaaaaaaaaaaatagtttttttctaagaaaatacttgtggttttagtagcagaattaactaaactgcccagcagttactgttgtatgagcaattttcttcaggttttcaggttgaagaagctggtttaagattttacaacttctaatagaattgaagacattgaaatgctggtttgaggacttgcctgatttctatcagcagcaatgatattcatgcaaaattttctttgaaaatgagctcctaagcactttaaaaatgctttggggtgcacgttttcctgaattcatcctataaaatatgtatcatgtgcctatatgcacatgactgagctaaacttgattttaaaaatcctaaatgcaaaggtaggcagcctgctctacccaagagggttttttcctggcactttgcctttatcaaccacaaatatgctcattctttcctctttctgccttattgcagttcactttctgcctctttttgtttctaagtctccttgatatcttgccctcttttgttcctatgtattttattttattcaccttttttttgagataggcccttgctctgttgcccaggctgtagtacagaggcatgatcatagctcactgcagccttgaaatcctgggctcaagagatcctcctgccatggcctctgaaagtgctgagattatagatgtgagtcatggtgccgggcctttattttatccctgacttacctgccagagggtttgctcaggggccccatgtgttaaaatgtttcaccaaatttacctcagttgtgaagcctctgagaataccagagagatcactggaaccaaatagcctagaagttgaccttaatacatgcaagacactaaatccacgacagcaggggtcatacctaccctacttactatcctagctgcagcatcttgttcaatgcattgaaataatagatatacatttgctgaacaatgacttgtcaagaatgctaatacatgaaaaagccctttgtatcccatctagaatactgaagagttcttgcctggctgtactcctggggctggcaaagacttttctgtctaagcttccatgagctgtctgcccagtaaatttggactggtcccatcacctgggcatattcatggttaaaggttaatactcctagagaacgctttcccttccacctctttccttgacttacttttattaatccatcaagtcctagtttagacaatcaattttgatgaaatttaaatctaggatggtggcctgatctcaggtactactgtgtttttcctctctcagtgcttatcacactgactttggtttttaattgtgtaagaatacttaaaataagatctgcccattttacaaaaaatttaagtgcattatatagtattgttaacgttaggcccaatgttgtacattggatgtttagaacttattcattttgcataactgaaactttatacccatttagcaacaactcctgtgccccgctggcagtggcagccaccattgtactctctgcttttatgagtttgactactccagatagcccatattagcagaatcatgcaatagttgtccttctgtgatggcttatctcacttagtataatgccctctatgttcattcatgttgtttcagatggtagagtttcttctttttaaaagccaagtaataatccattgtatgtatatatcccattttctttcctcgttcattcgttgatgaacatttgggttgtttctatatcttggctattgtgaataatgcttcaaggaacatggcatacactatctctttgtgttcctgattccagtttttctggatatataaccaaaggtggaattgccagatcatatggtagatctattttctttaagaactttcatgctgttcttcacaggagctgtatcattttatattcccatcaacaatgtaaaagcattccaatttctacacatcctcaccaatacttatttatatatatatatatttatatatatatatatgttagtgacactattttatttttattattttttattatactttaagttctaggatacatgtgcagaacgtgcaggtttgttacataggtatacatgtgccctgatggtttgctgcacccatcaacccatcatctgcattagatattactcctaatgctatccctcccctaggcccccacccctcaacaggttccagtgtgtgatgttcacctccctgtgtcctcattgttcaattcccacttatgagtgagaatatgtggtgtttggtttcttgttcctgtgttagtttgctgagaatgatggtttccagcttcatccatgtccctgcaaaggacatgaactcatccttttttatggctccataatattccatggtgtatatgtgccacattttctttatccagtctatcattgatgggcatttgggttggttccaagtctttgctattgtgaatagtggtgcaataaacatacatgtgcatgtgttttatagtagaatgatttataatcctttgggtatatacccagtaatgggattgctgggttaaatggtatttctgtttctagatccttgaggaattgccacactgtcttccacagtggtcgaactaatttacactcctaccaacagtgtaaaagagatatttttaatagtagccatcctaaaacgtgtgaagttgtatctcatctccgttttgatttgcatttccctgatgattaatgagcagcttttcataaatctgttggccatttgtatgtcttctttggaaaaatgtcttcagtcctttgcccattttttaattaggttatttgggtttttttttttttttttttttttttttttttttgcaattgaggtgtaggagtttcaattgatttttctatttctcctttgactgttagctctatttgggaagaaagcttctctttcttgctcacctctatatttttagcatctagatactgcttggcaaaagccggggtagagacattgagtgaaagccattaattgaaatttttaaatggggactttggcttaacctggctagtcattcatgctgttatataaacttacttgaaaaaacaagtggaatcccagggcgtttgaccaagctggctgtactgtgagtgaggagtcagcaaggattaacgagcaagctacagaccgtggaattatggaaaatctgaaggacagtgttcagggatgaagcaaaaataaaatgccaaggagaaaatccaactgaaggatctgtctggagttgatgagcagaagtgggtgttatgcaatggggactgaaatgaaagacacagtgacattgtaaatgagtaggaaaggagggtaggctgaagtacccaaatgccttggaacctggtcgaggagttgttttgtggatcttctaatctggagcatagagtgaagggaaggaactgtttaaatgtgccagttcaaacaggatagatgttgtggttctcaatttcccaaaaaatgctctttaacatggagaaaaaaaatcaagattttctaaactaattctgactgtaaaccattgtcaatcttggataaatcttcattaatttaacattaatttaattgagaactagttggcatctgacaggtactttctcacctggaatagaccaaaacctagagatctgtaggaaagtagccctaagcctaactgccttattattattattattaagtttcatatgtgatttgaattaaaaaccagtattgagaactgctggcatggatgatctaatttaatctaattttagcatatgggcttgagatggtctcctaaaatgcagagaaaaaaatcaaataaataaagtaaagcaaaagcagactatagatatgaaaaaaatagaaaagaaatgtaagctacaaattatagtcattttctcaagagaggacagggcattagaacagaagcaatgatttgaagcatagttttagaaagttacaaaggaaagcccccttgaaagggcacgccatgtttcaagtgaaatgaatttaaagagaggcacctgggcacattcttgaaatatctaggaatttcaaaacataaaaaattctagtagaaaacaaaacaaaaaaaaaaaaaagaaggaaaagacacaaaggtataaacccgagctagcttcaggtttttatgatagaagaaaatgtaaaaatggccaagaattttgtgaaaaacagtttgttgttatctgcacccagtcaagatgttgtcctcatgtggaagaaaggttaaaaaaaatatttaaaatcttatgtagaaaaaattatcttgacaacctgctgaaaaattgtataaacatattcgccatctgactagattttaggagtcattagattttcatctcacagcatataccaaaagtatcttaagtaaattaaactatatgtgtgtgtctctatttataatttacttcatgtatatatatgctaacagaacaatgaaaatatacataaatatttcaaggtaatgcatgaatcaaaaaggaaagtattcataacactgactctttaaacatctgtttacaacagaaatcatcataaacaaaatgttttaaaaaccaacaaaataagaatgtatatattatacactcaacatgtatatattatattttctctgtgtatgtgtatgtatatgcatacctatatacacatatataaacacaatacacacacatatatacatccaaactataatgatgtaacaaatatgaaacatatggaaccttgatgtgggcaaatgacatgaagaggaattacaaatctaaaagtaagtatattgataaatatttgttgagtaaatgtttaaaccccaaatttaaatgtatacatatatatatatttactcataatgaacaatttaataataaacaaaggcaaattaaataaacgacctaatgcaatttgtcacctattaaattatcaaagattcaaacagccatccatatggtatttctcatgttggtaactgtgagtagatgaacatcttcacagtaccacacttactgctgctgaatgtaaataacactatcaaactggcaatatgtattaagaacctttaaaatatttatttcttttgactcagtatttccccttcttgactctgttcttagaaacgtatcaggatactgatcaaaatgcatgaaaaatggtgtctacttcagtgtcatttgtagtacaaaaaaatttagaaatggataaaatatctagctattggttaggagaaaatatttttgttacagccataaaaacatttaaaaacaatttttcatgatgtgaggaatagtttattatataattataactaaatcactgaatgtgaaattattagtatgattgcagttttgtaaaggaaaatagattatgtttttaggagattggaaagaattaaccaaacatagtgctattattctctaaatggtgagatattaggtaatttatatgttattctttatgccctttacatataaaattctaagtgtatgttcaaaaaattataaaatagcagggaagtattattcagtaaacaatgcgctgataaatagcaatttaaaagcaattcagattagatccttatctcgtacacaagcatacatttgcttattgctttagtacaatattttctatgtctgtctgaatgccagcactgcaacattttgtagcttgattattttgcatttcaattactacaatctctacaatgttttaggagaaaaataacagaatggctagtttaatctattatacaaatctaagtacacatttatagaaaaatcaactatttcatttatagttggatctttaattttctcatgaaaaaaggaactaggctaaggcataggttcttcactttttgctgtaatgacattaaaagtcaatttgagagaatgcgtgctagtcttttactgttggcaatatacagcaattgcattaccttagaacactgttctttgcagaatgcatgctcattggagagttaatgaatgttaaattaacatcttaatgaaaattgtatattaatactgctcttgttcctaaatagtcatttaattctgataaatcaaggaattcaatttttgctaaataaaaatcaccgtcttggaaagcatgatgctgcaactgaacatttgctgtatttctgaaattcagagctactattaaagagaaaatacattcagtttgaggactgtatggtttggaaattttgcttactgtcctatagaagaaatcaaacggtgttttcagtgttctaaaatgagtcattagatactccaatttagttatagatatgaaaatggtatactgtattgctcacatgatagaactttaacaatatttctatcataaatttaataaaaggtttagcccaacaataaaaacatgacagtaagattcttaatgcacagtataatagtaagaagataatttttaattaaaattttaatcaaaatgaatttaaatatttcagtgcaattgaaaattaagtatgagttttttgttgtttttgtttttgttttttttttagattcgggggttacatgtgtaggtttgttacatgtgtaggtttgttacatgaacatattgcataatggtgagatttggacttccacagtacccatcatccaaatagtgaacattgtaacaaaaggcaatttttcagccctcatccctctgctaccctaccctcttttggagtctccagtgtatattatttccatctttatgtccatgtgtgcccattgcttagctcctacatgtaagtgaaaacatggagtatatgatttactgtttcttcgttatttcacttaagataacagcctccagctccatccatgttgcacaaaagacatgattttattcttttttatggctgcataatattccatggtatatacatccctcattttctttattcaggtatcacttgatgaacacttaggttgactccatgactttgctcttgtgaacagtgctctgataaacatacaattgcaggtatcctttttatatgatttattttcctttgggtaaatacccaggagtgagattgctgggtcaaatggtagttctagttttagttcttcgagcaatcgctacactgtttttcatagaggttatactaatttacattcccaccaacagtgtataagcattccattttgcatgcatcctcaccaacatctgtagattttttaccttaataatagccattctgactagtgtaaaatggtatgttattgtggttttaatttgcatttctgtgatgattagtaatgttgagcatttttgtatatttgttggccacttgtacatcttcttttgaggaatgtctgttcatgtcccttgttcactctttagtagagttatttgatttttcttgatgagttgtttgagttccttgtagattctgaatattatttctttgtcagatgtataatatgcaaatattttctcccattctgtaggttgtcttcttattctgttgtttatttctttggctgtccagaaactttttagtttagtagtctcatttgtctatttttgttttttgttgcatttgcttttgagagcctagtcaaaaattatttgcctaggccaatgtctagaagactttttcctgggttttcttgtagcattttcatagcttcaggtcctacatttaagtatttaatccatcttgagttagtttttgtatattgtgagagataaggacccaaattcattctccttatggctagccaattttcccagcaccatttattgaatagggcatcctttgcccattgtttatttttgtcaaccatcattgtatgtggctttacttatgggttgtctattgtgttccattaacctctgtgtctatttttgttaactatttaaaaaaaatacatattagaggctgggagtggtggctcacgcctgtaatcccagcactttgggaggccgaggtgggcggatcacaaggtcaggagagcgagaccatcttggccaacatggtgaaaccctgtctctactaaaatacaaaaaattagccaggtatggtggtgcgtgcctgtaatcccagctacttgggaggctgaggcaagggaattgcttgaacccgggagatggaagttgcagtgagctgggattgcaccactgcactccaacctggtgacagaacaagactctgtcttaaaaaaaaaatacatattagagagttaacttttaaaactacaatatatgttagtaaacataaaataatccagcatgaaatgagcaaataatatttacaataaaatttaaatatttgcatgcaatatttgattttgaattataacttaaatataatttaacagggtgttgataaagttttagttttcttaataccttcaattctcattcttctattcatttttttccttccctcaatctcccaggaacccttttgtcttaattagttccatcatattttgaccactagaattaatcatccaacaagaatgaattgtctgtcgttcttcagtcttttctttaatatcagcatttaattaatcaccaggttctacaggaaactcctctttccctgatctcccagcttcacttatctccaaccacactcccgctgtcctagtgaagaaccctataaattcttatccaattattttctctttgtaacttgttcaaacttggtaactttgtaactagccttacagcaagccctgctcccatccattcaccgcgtgctaacgaagggctctggctagaaaacaactctgctagtatcaccaccttgtgtccatcttttgatggcttcccattcaaggtccctgttgaatagccttccaagtggtagagataaagagcaaattccataacaggatttgtttttaatttccaacttttatgttaagcttaggggtacatgtgcaggatgtgcaggtttgttacataggtaaacacgtgccacagtagtttgctgcacagatcatcccatcacctaggtattaagcccaacatccattagctattcttcctgatgctctccctccccctaccctccaacaggccccaatgtgtgttattccccccatgtgtccatgtgtttttatcactcagctcctacttataagtgagaacatatggaatttggttttctgttcctgcattagttttctggggataatggcttccggctccagccatgtccctgcaaaggccatgatctcattccttcttgtggctgcataatattccatggtgtatatgtacggcatttttttatccagtctgtcattgatgggcatttaggtttattccatgtctttgctattgtgaatagtgctggaatgaacatatgtgtccatgtatctttataatagaaagagttatattcctttgagtaatatactcatgtattagtcagggttctcttagagggtcagaaccaatagaatatatataggggagtttattaagtattaacatacacgatcacaaggtcgcaaaataggctgtctgcaagctgcagagcaaggagaaccagtctgagtcccaaaactgaagaacttggagtctgatggattgagggcaagaagtatccagcatgggagaaagatgtaggctgggaggctgggctgggctgggctgcgctgggctgggctgggctgggctgggctgggctgggctgggctcggctcggctcggctcggctcgtctcgtctcgtctcgtctcgtctcgtctcgtctcgtctcgtctcgtctcgtctcttcatgtttttctgcctgctttatattcactggtggctgattagattgtgcccaccagattaagggtggatgtgccttccccagcccactgactcaaatgttaatctcttttggcaacagacacactcaggattaataccttgtatccctcaatccaatcaagttgacactgagtattaaccatcacaagtcagtaattggattgctgggttgaatgatatttctgcctctaggtctttcaggaattggcacactgtcttcctcaatggtcataacaagacttttgaagccctgtgaattctgattcattcttgaaattcaccccttttttgaccacttctgctaaccactttgctttccacctctactaaacacattcctcaagacttgacatgttttcacttatctcaagatttttgtttttacttagtaaggtgtaagtaattgacacacattttttaaaatgactgaacatataaaaatgttaagcccccgacctacagtaactttccattgccacttctcagcactttacctcactgagtcctattatgtccacttatgtttatgcttaagaagttcactccttcatgacttcttttccaaaggctttcttaattcctggtgctgtttcttctgggtaggagcaatattgctctatctatactgactacatttgtatcattatccatttacttatttgtctttcctgcattccttcattacaagtatttattaatacttgtatcttcaatgccagtcacatgcttgatagtattaggcacccagtaagtgtctgttgaataatgagataaatgaaaattctggtgtagagatttataaaatactctattaaaatcatccttgaccaccatgagtcagctcacatactacctcctacaatagaacttttctgattctttaccattgtcaactggatatgacctttctgaccttgcagcccctgcagtacttcagttatcctctcttaaaactcataatgctctaaaatttttatagaaccacaaatgacttcaaatagccaaagcaattttgagcaaagagaacagagctggaggcatcacacttccttgacttcaaaatatactacaaagttattgtagccaaagcataaaaacagacatagaccaatggaacacaagacagcccagaaataaacccacacacttacagccaactgatttttgacaaaggcaccaagaacattgaatagaaaaagaacagcctcttcatcagagttctaattttttttccctagacttacaaaaggtactcaagatcagtaagtacagaaaaaccaacaacatatgtattccttaaggaaagaggcttgtttttatccgccctgactgcttcttctgaagcaaaccaggtgacatgagtacatgtgatgttaagtaaatgatagcattataattttatcaattgacctataaaataagtatccccaatttgcattcttacagggagcatcaagccagatttcatgttatacttgaatgaaaattcaataatcagtgtctaactttgcatgtctctaatgtatatttacacttccttttatagttaataagaggattcatgcttcatatgtcatttaaacctcctaaaaattctatgaattagcacagctttaaaacactgatagaaagaatggagttcacatacacacttcacagagaagagaatctggattttggctggttgtttcagaagacaattaccaagatgttttatagcaggggtccccaacctccagtctcaggttggtaccaatctgtgggctgttaggaactgggctgcacagcaggaggtgagtggcagtggtgagcaagcattaccacctgagctggcctccagcagatcagcagggtcattaaattatcataggaatgcaaaccctgttgtaaacttcatatgcaagggatctagggtgcatgctccttatgagaatctgatgcctggtgatctgaggtggaacagtttcatctgaaaacctccatggaaaaattgtcttccatgaaactggtccctggtgccaaaagtttgaggaccattgttttagaggacaaagtgtgagagaaaaatgaccaggatggtgagcaaactcattaggaatggttgaagcttgtgtgcaataaatacttgctaaacaggattaaatggaataatgtaatgtttaaataaaaaaaaaaaacaagaaatggggggatcaatttgcataaaattcagacacaaaatgatgctgaggatgcctaagtttacatattttttgcatatggtatattaaggttttatgtttttgtccatcacaagggcctgctagctggaaaaattagatttaggtaggttgaactttttccttaacagtgcatatttccaagaactccaaagagaaaagagagagagtgtataagcaaacaaggcacttgtgataattatttccttaaaaaaagattcagggatcaacacttttttcttttatttttcaaaaagagatgatcagcattcagaatattttgaaaataaaacaatgcaaaactcagcaagtgtgttttatccagttcaatgtctgtaaatcttttattaaaacttcttctgcctcagacagaagaatcttctacattatgtcaggatttcaagagcaacattggaaagatatgttgctttcaagtgatttttttctccctagttaatgtttatagggaaggctttcagaacaaatataggaaaaaaatcaatcaccaaaggatgagttgtgctctggccccaaggcaggagttgctgataactccccatgacccccaacccaaggtttgaattcctccaactttccttctctactttctcttttgtgacacctgagatagttggtcacaatgttggtgaccaagaaaaaattaactgccctaaaccacttggaaattgaaactacaaactaattttcatgaacaccatttcagggaggaacatacttatgtagtctcctaattgcagagtttttaatattgtacccactaaagattttcttttctgtctgcctgcctgcctgcctgcctttctttctttttctttctttctttctttctttctttctttctttctttctttctttctttctttctttctttcttccttccttccttccttccttccttccttccttccttcctttctttctttcttttttttttctctctctctctttctttccttctttctttctttctttctttctttcaagatgaagtctcactctgtcacccagcctggagttcagtggcatgatctcagctcactgcaaccttcacctcccaggttcaagcaattctcctgcctcaacctgctgagtagctgtgattactggcacatgccaccatgcccagctaattgtttgtatttttagtagagatgaggtttcactatgttggccaggatggtcttgatctcctgacctcatgatctgcctgcctcagcctcccaaagtgctgggattacaagtgtgagccactgtgcccggccagagtttcatttttttaagtaagctctagtgatatccagttgagaggttgccagggctccctggcccagagcctagaaccagactgtaatgaggtaggagggttttactatggctcaggaaagagacttgttaggaagctggtggaggtggacagaggaggaggctgtggaaaaggagacaaaggggcctctgagggaatcctggagagggaaagaggcctaggagttcagaaaggcttctgagaggtaggtggtcttttgaacatttaccttattccaactcgagttctaagtcttttgagctttgcctgtcattaagttttgtaagcatagaattgcattttcttaaatgtaggcagtctgtcaccttaaaaatttctagccttgtttgtagaaaagggtgaagaacagctgcccaagtgagccacctaattttctctgtgaggacagtccactaaatggccatgttcaaaggaatctcacaattcacagctattgctgcataatgatttatgagccaaatcactcacccattagaagaatgagtcttcaatggtcagatcaaacataatttattatctctaacgtctggtagtcttatgtttttctaacactttgcagcttttatcagggtatgtattcctgcctgtggccacagcactgaagaaaatggcagttccttttcagttttgtccaataatcctccacgttcctgcatttcatcagtgttttcagtgttccaagactgtgtccagatacacagtagagttagctttgccttcccttatggatacacataaatacctcccttatggatatagatacataaagtaagcatttggctattttctgtaattagaaaagatttaagaaagcccattttgccaaaaatatatcatgcaagggtgcttggggattcttttgagctcatcatttaaagaaatacaaattatgcttaatgaatgaacataataatctcctaatactttagctgagatttattttatcatataggtttcaaatcagcaaacattatcggttgcattttatatttgagatacaaagttatttatgttgtgggacctgaaactaagtaaacagttatccttgaaactggggaccttttagactacgagaatgagtttctcaaagtctgtcttttatagtgcctagaatagtagaactgataaatagtgtttactgaataaatacactactaaattattccagtggatttcccatgcacacaaatatctatgatcaatacagtacattaggaacaccatgagaatactacaaatattttggcaatgaggagagacaaagaggatttgtaaaggcttcataaaggatgtttcatttagcttgattgttggatagaattgaggaggcttgtgtgaaaaggttgtgggaatttctactggggtcaagagtaccaaaaaagaatagataatttttttaagggtaatcctgtttgggaaatcagctagtgcctgtagtaaagcaggacagggagtgaaaaacaaggattgcaaccatgaatggaatcctgggagtgccttgtaaaggaacatagacattattcctaaaataagcaatcaggagctcctgaaggcttttcagcaagagtatgactatcacagtaaccaaatgagatcattgggtaccagagaagaaaacacaaaatgatttgggggcaaaagacaggtctttcttccagcatggtggacaaaattggcctagagctctgtgaatccaagaagaatgttgtgtgacttgttctttgaatactaagtgtctacataagaagatattcttgtgccaaatatactttttcaccaaaatataatgccctctcctttttggtcctctggtatttgaattaactaatacctttggtaaatgtgttctgatatatagtatcctggtgaatagtatggggcttccttggtgtaggggcttccttggtttaaggtgaacacccttcagctgatggtttgaaggaatgtggaagatgtgaggcctgctctgggaaagacatgccccagcggagaaggagaaaaaacccacagcttttattatgtgagaaaagaagtcagtcaaaggaggtattcttcaaacacaaagccaaagcactgcaaaagaatctatgattatttcttaaataactttttgttaatgctactccctaggtgtcctaaaatctcagctaaatgttttgaaatctggccatgttttcaaagagcagaaacacccacagagttgattctcactcttacaagttctaagtgatgcctagggcttaagatgcaccattcttacagagttacaatagtagtcacatgatctctcttaatttcccatgatgaagacttagaaagtgtttcttttataaaccagagggtaaatacaaaatgtcccctttaaaggaggctgctaagaggtacaaatgattggactcagtgttttggaacttgctctatttttttccagatggataattgttaaagggttattacaagtagttacatgaaaaggcaattatgaggaggctatgaacaaatctgccttcattttgatttgaatattggagcagtcgtagtatttgttgtgtgttcctggtaatggaattcaaccttttatcttttgttaaaatgttctgcaataatatgtgattatgcagatgcataggaataaaacatgtattacagagtccatcactctgcaatcgtttttgtattatagcaaatttcaagtctttcttactttatgtagctacaataagaatgtatctttggatttgcataagatatgtatatgagtgctttttatttattaaagccattcaaagaggaaccaaacacaggaatatcaagatttcttttgaataagtaaaaacttggggaaaaatggcaaataatctggcacttttttatattctacataattttatctaaatgttgtcaattcaattaacataatttttaaaaacttgcataattgcaatacatattttccagatttgtgaactattttcaataaaatcaatttatataggctactttctaagaatactgcaaagaatatcacctccataccgtgaagaaatcagtaaaataatttgtggaagtgatgcttaatttcattgtatacataacatctaatttagttccaaaatattctctgagtaggacaaactcttgtcaattttgttaattatttttgttctcacagtatttaaaatatgctttaaaatttttgcaaaagagagatgttttcaactattttaagattaaatgcagaaagcagagattgcaattatgaagcttatttgcatgcttcagaatgttgaatatatattagttattaatatttatctcatttcaatgatataggcttgaaatagtaaaagaatgcctgctttatgaatgaagaaaacagaggataacttagcttagctcctgataagaccctttgctttaatagtcacatgacacaaaaatgcatcaggaccaagatgtcaatgtctatgctaagaagttaatgtccagacagaagacacttagctaactaaaaattagccgggcttgatggtgggcacctataatcccagccactcaggaggctgaggcacaagaatggtttgaatccaggaggtggagtttgcagggagccaagatcgtgccactgcactccagcctgggtgacagagtgagactctgtatccaaaaaaagaaaaaagaaaaaaattaaaaagaaaaagatggcacttggccaaaaaatgtctgttgaaggactgcagtgagcattgtggaactgcaatgagctaaactaagtggatgcttatttcaaaaagcgaaactgacagagagagaaaaacaaaacaaaacaaaacaaaacatgtaaataccacagagcttcagaggtgggagatgtcaccacaaattgcagtaggcagggcacaattaagctagaccttttaaggtgggtgaaatttggattacaggaggaaagaggtaagggcatctaagtgagtgaatgatagctgggggttgctaggcgtgtacatgggacagtttgtacatgcaggaactccagaagagggggagagctgggtgagaaggcgtgggaatcaagttcatttcatggactcctcaatctcttttgctctagtttccccccacccggtgcccctgttgtttatttctctctctcgctctctgtctctctctccccctatctctttctctcttcccttcctctctcctttttcctatctctatccctatccataagtttatctttagctctagctcttacttagaatccaatcagcctccaaagccaagacaattcctttgtttaaagtttcactctttcataaacaaaattcattttttctgctctaaacattttttctcattattttctcttctagcacactgttctcgccatctaatattgtcagtgttttactttaaagagtcagcaccgatgatactgaaattcttacttatttaattttatcattccatataatttattaaaaattattctgcattgtggttttgcacacattgctggaattttcttctgatcaaccaatgagtcttgggtctgttgaaaatattatttgtacatctttttattttccaatagatgaggaagagaagaaagaggaggaggaaggcagagagagagagagagagagcacaaagggtaaaatcattaatgttatatcaagcaatttaaaagtattttagactctctgccagaagattgtgaaaacatagtgcaaggtttattattattatttaagtaacacagtcatgttattggcctagagctatcttaaaatttattttaagcccattatttgtggttattaccgggtaccaccagtacagtgaaaagaatattagaataggcataaaaatggattctaattcttcattcatcactatgtgattttagtaatataaatttatctctcagagtcttgagtaataccatcattaaaagagaaaagaaattatggcattcttacattagataatctaaaaatttcattccagcctccaaattatgtaacagaatttttgttccccttcctctaaagcaaatgcaatttgcaaataatttatattaggaattctatccttccagttgttattatagaacataattattcctcatacattttatgttaatgattttagtgcatgaatggttttattcaagactcattatgccaataattttaaattataatatgtagagacaaagaaaaaaaattaacaggcaaaagatgaaagctatcagtctgtcaagtctagacaccagaacaattgtaaacactttgatttttttttcttccagagaaaatgaattgttagttaaaaatcttgactaaagaataaaatagtctaataattacttactaattacttacttacttactaataattgatttgtacattttatcttaatgttcttgagtgtaaagttctccagaggcagggcacggtggtttacgtatgtaatcccagcactttgggaagctgaagtgaaagggttccttgagcccatgagctcgagaccagcctggtcaatatagtgatacccccatctctacaaataataaattaataaaaattagttgggcatgttggggcaaacctgtagtcccagctactcaggaggctgaggtgggagaacagccaaggagattgaggctgcagttagccatgattgcacccctgcactccagcctaggcaacagagtgagactcttgtcttcaaaaagataaatacaatacaatacaatacaataaaatacaataaagtttcccagcaagtttggtgtgtgattgtttgcatagtgaattctgtaatatgagtgtgtgctcaggaaagggttaatttgttcatcttgggttaactctgggttgctcaaaccctgcagactcctaagaaaggcctgtctgcctttggaatgccccttggtagctcctgggagatgagctaaacccttggaatattctgcctgacaagagtgtttctattggcctaaggccttgggccacccagcaccggttagatcaaatagtttaggctaacagtatgatctatggtgaaaactgattttgcttttgaggggttagagactgagtagctgaggtcacctgactgactcccaattaaaaaccctggacatcaagatttgagcgagttcccctggcttacagactttggcaaatgtttttacacatttcaagaattaagactatccatgcaactgccttgggggaagacacctggaaccttgctcctggtttcccctggacttgacttcttacactttttccctttgatgttttaatctgtatccatttgttacaatatattgtaactgtgaatgttaacagttgttcaagtctcatgagtgattctagtgaatagttgagactgagggtgaattgtgcctgcctcaccccaaagtatggttcaagacagtcttttaattaataatatcacttaagaaagctttcctaaataattaaattaataatatcacttcagaaagctttcctaaaatgcttctaaagtcaagcaagattttttaattaaaagcttaatagttaactttaaattacattaagagaaaaaaatttactgaaaacatactatctttaggctatctgagatttttaagtatctattaccaagttttcaactttcagtgattccagatcatttggattcaagattaaagtgattatattttttctctttgattcattattataatatccatttgataaagaaccccaaaagaaatatcattatgtaccttcaaatcatatttatttggaagactcattaaaaaccagaagctatgttgtactttaaatatattatctttagtttttaattttcagcataatcaggtgatataatattaatgttgctttatatgtgagaaaaattgggcttagaaagttaaagagattactccaggcatactactggatgtggcatagagagtatttggattagggtctattaggaattaagttcatgcttgttctattgtgttactccatatattcacccttaatgacatgttacttattctgcctctggtagtagagagagtaagctgcttgtacatcaattttgcttcttccagctgggcgtgatagctcactcctgtaaacccagcattttgggaagccaaggcgggcggatcacctgaggtcaggatttcaaggccagcctggccaacatggtgaaaccctgtctctactaaaaatacaaaaatacaaaaattagccgggtgtggtggttgatgcctgtagtcccagctacttgtgaagctgaggcaggagaatcacttgaacctgggaggctgaggttgcagtaagccgagatcacgctactgcactccagcctgggtgacagagtgagactctgtctcaaaacaaaacaaaaactttgcttcttccttaaatatttaatggaaatcaacagagaagttatatagagctagaggttacgcccggctaattttttgtatttttagtagagtcggggtttcaccgtgttagtcaggatggtctcaatctcttgacctcctaatccgcccgcctcggcctcctaaagtgttggaattacaggcgtgagcgaccgcgtccagctgagaatgttttttattgcaaattcatttttattaacagatattgtaattgtaaccattaaattcttcctgagtccatttttctattgtgtctaccaaggaattttaaaatttcttttaaactgtcaacattattggcataacatttttataataatttctgttccttttaatgtgtatggaatcaatagtgatttttaattcattgctattattgatcatttatatctgctctctgtctctctctttcagtatatctagaggtttataaatgctgctaataatttcaaataatgacttttggtttctttgatttgctttaacttctattacatactctctttttttacatacttttgatttagtttgatattaatttgctaggttactaaagttgaaacacattaattttaaatatttttatttatctttcatatgcatttagagatataaaaattttttaaccactgttttaactgtatcccataaatttgaatagactgtgttttagttattattcagttaaaaaattttctatttacctttgacatttgttctctaactgtgaattatttataagtgtgttgcttaattcaaaatatttggtgatttttccagattgtgttattattgatttttatgtttaattctgttgtggtgagagaacattatttgtatcacttaatcctttgagttttagtgagcttgtggcccaagcttttacttatataaaaacaccatttttttgccatcatttaaaaataatattatactgactatagaaatgtaggttgatgggttttatttattgatttttttttcatcacttgccttcttgcttgcatcatttttctatgacaagggcgtgataattcttatttattattgttcaccagtgtgtaatttatctggctgcctttgagattttctcttttactttggttttcagaaatgtggtgggactaggtgtggttttctttgtatttatcctgctaggattttattgaacttcttggatgtgtgggttgatttcttttggtcaaaattgacaagtttcatcattattcattcaaatacttttttcattctaattgctctcatcttcttggacttcaattatgtgcacatttctgccaccctgaactatgaattttatttcttccacccaccaagaccccagctctctggtgtgtctagtgctgtgatttggataatgatccctggtggaaagctgaggttaatgcagagatcattttgtgcagctcccctatcccagtgatcatagccctgagttatccattgttccatccttgaaaatagctactgtagatatttgtcaagttttagtgttatttaagggagaacttaacacatgatgactatgattctttcataactattgctctgattagtatcattctgtttggaatctcagtgtttctagtttgctaatataacctagttgtaaggggcacaactggattaatagttgaatcccttaatatacacagaacgctatgggcccagaattgtataatttttcttacctgaacacatgcacattttctacataatggattgtatcccctttctcttatttttactcattacttcgtttacatttagtttgtttgaaagcaagttctcattctctcactcaggcaggagtgcagtggcatgatcgtggctcactgcagcctcaaactcgtgagctcaagcaatcctcccacctcagcctccctagtagctgggactaatgacactaacaccacctagcccaggtaatttttttttctttcattttttgtagagatagggtcggactatgctgctgaggcgggtcttgaactcctggcctcaagggaagtctccagccttggcctcccagagtgctgggatcatagacatgagccaccacacccaagtagcattttttatgtcttcattttttaataccaacctcacccatcctttcttttcttgcctttggaagacaactttatactaagaaagctacttttttgtttataggtaacttactgtctagttaagaactgactcaaatttcaaaataatgctcaaaaatttaaaacatacaagaacaaaaacatttggaagaattattttctcattagcactgcttttctaccttcttcttgatggtaatttgttttgagcctaacttttgtgattgctaatttcattataaaccaaattctccagctcttttatgactggtgtaacaggaagtaaactaaccagagactcagggaccaggattccaaccacagctctgctcctgactagttgtaagattttggtacattacttagcacatttgatcacagcattctaacccttagtaagcaagatgctttctgatgtcctttcaactctaagttctatctttaaggatacaatttgaaatgtttctcttttcccactgagcgaactcagactcctaaagaaattgtaattaaaaatggccttttgctatgtttgacaaaggacaaaatgtgataataagtattaaagcaatttgaaatagttttagcaatgtaatttagattataattatcatttctggaggctatattcattttttatgttccttgtggtacattatatgtaatagatattgaatactttcttaattttatgattaatatacttctggaaaaggagaatgacagttgaaatcacttaatgtgatgaaataaatatggctttattcttttcaaattgtggtgttttctgtgattcactacttctttcatctattaatctgtgctctaagtggcttgatcccatcttggcacacatcaccatggattcttaaactataagaagctgcattcatgcatgtgtacatttggcaaccttgtgttgaacagagctctgcatttgatgctgtggataaataaactgttatgatactgtatctgcactaaaggagctcaaattccagtggaggaggttgacagggcagtcaataattctaaatccagatgagcagtgcacaggctgcttgggaatcataaacaagaaatcaaatttaggaaatttgaatgggtctttcaagagtggagtggataatactgtcagcactggtgcctttgtgtacctttaacaggccacactctttcctgtctgtctttgcacacacagcaccttctgactagaatgttctttccctgtattttcacttcccattatctaatatttagctgaaatatcattctattaaggccttcattgtccaccttctccacaattgtatcacccttacaatttaatttccctaatattttactttgtagccccacttactattatccacaactaacttatttatttgtgtcattgtttattgtatgtctgaccagatggtaggaacctgtttgggtcactgcttcatatccgtataatctggaatgcccctggctcatagcagccactcaaaaaatatttgttgaatgaaagaaaagatgaaggaaggaaggcattagaaaattacagaatgaatgtctctccttccagccctccacaccccaccaaaaaaaaaaagggtggaaaattagtacaaaaaattactctcaattattaattcagaaaatatttattgagtcaaatgctattctaggccagagtgcctgatgtgtaaaaaataacattctcccttattaagaaaaatattatttatttctttctacagatggtcagaaaactagaactagaaaaaatgtaataaaaaaaggatgtaaaatgttaggtctcattatgaatcatttcaaacttaagtatgtgtacatatagtagtgacttagagcattaccagcagcatattctgttctaatagactggataactgagaagaaataacatttaacaccctcattccagaaatattgcataatccctgtctcttgatttggggctcagccatatcacttgccaaggccagtgaaataatagcaaaccccctgcaagaagagaggtacagtattttgtacagttggtcttgtctcttgcgcttctgccatcaccacaaatagagcttccctgaaatagatgctgctctctcagccccaggccatgtccacaaggaatttataaggaccagacttgagcccaatgcatagcaagtccagcttgaagcagagcatcccagcagaacccagcctaaatcagccgaacccctgccatctgcagatgtgtgaatgagcataaatgattgtagttttaaactgccaatttttgtggtggtttgttataattaaagaatgaaaaatcagccagatacaagcccccaacccctgttgaagtcctgagttaagaatgtcaaatacatatgtgctttgtttttatgctgttgggtatgtggaagttatttaggaaaacatcgggtagtcctgtgagctagcaaggcacaagaagcagggttttatgggcatacttctgcaagaaacaaagcaagttttgctctcattagtcatattcaccttgcaaattaaaaccaatgtcccatgttataaaagaactttggattggcctgtggtgtttatctcctgtgttaactcatgtatccttagaaaaagagtggaagaaaatgataatacctcatatttattaaacacttgctacgacaggtatagttccaggagctcatcattgacgtcagactctgtaaaatatgtgataaatatattattctcattttacagatcaggaaagtaaggagtagaccacttaagtaatttgcccaaggtcacagaactggacagtgacatagctgaaatttcacctttacaggcttccaggatccacatgcttcaccacaatgcagaagtaaagtatctctggcctactactcatgtataactcacgtatgatagataatacagaaacagttggcttctcaatactatttcctttaaaaattataagtacttccaaactgatttcaaatactgcagttttggcaattcatggttttgtaattgcagatgttctgtgtctgtctatttgcctgagtcttatggaaatgggcttgggcctctatctgtggaatacagcagacagcagaacatcaaagatcagcacacaggtgatgaaaacccaggggtgctggctctgaaaagcatgtgggaaatatatgagaagactcatagtcacacatctgatccaggaatgctggcttaacaatgttattactattagtaataatatgaagacaccagtttactaacaaagataggcaatggcaaccttgaagttatcttttaaaaaagaaaggaaaatatcatccaaagccattatcttcctttatagcataggtatggttgttttgtaatctacatacatatatattaaagagagcagctgtgcataattgaatgttctttgtgctggattctaaaattataatgaatgcttcattacatgagtaatgcaaaaagaggcttttaagattcacttctgtgaattttaatctatgtatatgatatggcttggctctgtgtccccacccaaatctcgcctggtattgtaatccccatgtgttgagggagggacctggtgggaggtgattgaatcatggagacgatttcccccatgctgttcttgtgatagtgacagagttcccatgacatatgatggttttaaaagtggcagtttcccccatgtgctctctgtctctctcttgctgccatgtaagacatgcattgcttcttcttcaccttccaccatgatggtaagttttctgaggcctctccagccatgtggaactgtgagtcaattaaacctcttttgtttataaattacccagcctcaggtagtgtctttataggagtgtaagaatgaactaaaacagaatatattggaaattttagcttcatccagtctgctttttagctagtgatggataagtccttgaaatcaaatgaaatataaaatgcacaaattctagttccaagcacctcacccaatgagagcaaatttaatagttcatgacattcccttcagatcactcttctttcctcctttcatacaatcttagaattttaaaaatggaggagactttaatgtcatctagacaaatttctattggattcttgaatttcctttgatggaggcatgtaccatttctggagtataccctacctcacagctgatacacttactggctatatcaaactgaacacatttcaggccaaactcttgacttctcctttcttgattttctccatctctgttaacatcactgctatccacctgttgcttgagtcagaaataatcactctcaccctttcccgttaatttttcacatctactccatcaccaagttatgctgagtgtaactccaaacaaagctgcacttctccttgtgtctactgtctcagagtgacaaacaccgtaacctgtagtctagactgatttgctagcttccaactaatttatctggttttgcttccacacacttttcttctgttttcctcacagagtattttttatttattaacatgaattagatctcttcctttcttctcaacctttcattagattcatattgtgctcaggaagaactataatctttgaccctgaaagctatgctattcttatctctttgcatagtatttctgcatggtgacctccgttgattgcactatattctattttcattcatacttcaggttgttgtaagagttgtgatacagtacatgtaaatcacttagaatagtgcctagcacataggtatatagttagacatttttattaggtttctcctgctgtttatttatttcatgttcgctcctctgctagaatttgagaacaggagctgtgtctattttgctcaatagttcatagcttaatagctcttagtacgcctggaaaattggatatgcatatttcatatttttaatacgttgaatgaaatctatatttaatgagttctagcctataggaagttatttttttgcatggagttgaaacttagcttctatccaaatgttgagcttcccacacctttagaacattcaaactaagttatactgtcattgtaattaaaaacagtgatatctatatctgtcctgctatcacaactgaatcaacattaaattcatcaacatctcttttaaaaatattcaatttaaagtactttaaacactaaaaatttataaatcctagttatttataaaagtcattactgacacctaaatatgtaactattttaaatttcctccaaatttccaaagctgtctattctaagaaaactcgatacatataaaaatacaaaatggaaaggagctaaatgaggaggtacttttaaatttatgaaatgatattttatttttaaagaatttcacatttaaatagcatgtgactttaaaaaacctatctacttgcttattttatcagaaagttaattgattagattagattggatttagatagattgctaaaatgtcaggattatctctataaactaaatcaagtacttgtgttttattaatacagtaactgcaagttcttaaatgaatcacaggaatctttgcaagaatgagttatttagattttgccatgtgtcagtggaaaaatacactttcagttaaattacaaatgtggcaactgaaagggcttcatgtttagatataaggaaataagtgaacaattggaaagcgtagttgttaacaagtttttgctgcaaggaacttgaagatccacttttaaaaacctggttcaactgacattgatgacctccacaagttacaaaagaaccacggtgataaaaagttctggaagaatgtgctgcttctgaaaaatgtcttaaaactgacagcctcttgtatagatttttatgaaatagtaaacaacctcaagtgaaaataatgttaaatggcaggcatattatccctctaggggaaaatataatgaaaataaaatgttttagaagtgtataaacattaagcaagatggcaagatgaacaatgattctttatttttgattagtgtggacaggcaattcaatcatttgactcagggagaaaaaagaatacagcttcaaagtttttgtggcagattattgctcgaataatctgtagagtgctgcttcagttttgattatgaagctattggccattggccaagaggagtttctttgtaacggaaagaggagttttctgtaataagtagggtttagagactcttcccataattttggcttggagttgtgatgaaatcagtctggggcaaccttcctgtcttattctactgataacttttcaccttatataagaggtcagggtcctagataagtccttctctgggaccttttactttcctttttcgtattgcatttaatcatttaagcatgaaattatttcaccacatttaggagggtcttaaggtacagatataaagtttcatttcttaaactaattcagcttgtgtactatttatggctgtttgtattggcttcagttttctcactccttcgtttatctcctatacttccaccaaagctatctctaaaagagattttatgttggcctttttcatcaaaatattcaatctccaatgaatttagcattccccaacaggatgtgccagtcccttgaaaatattgacccaactcatgtttacaacataaatttagcctctcagctttacaatgggttgttataagggaaagaaagagggaagggagtcagagaggaaagtgtggtaatagaagaagaggtcagagttttacagcttctggttttgaaaagggaaaagggccacaagccaaggaatgcagacagccagtggaatttggaaatgatgagggggagattgccttctaatgttctcaaaaggaagacagtctgttgatatctttgtctcaacccagtgaaatgcattttggatttctgacctccagaactgtaagataatcaatctgtgttgttttaagacatcaagattgcagtaatttgttatagcagtagtaggaaactaatatagatttggctgcctggaagtgggttgctgatgcaacacatacatagaaatgtgaaatgatctgggtacttggtcaatgagcagaggctagaagaattttaaggaacatgatagaaatggcttagattgtcttgagcagaccgttagtgaaaacatggctgttaatgaccctgttaaggagtactctggagggtgtgaggagcctggtggagaatacccaagtcatcatgagcagatagtaggtagaaacaaggatgttataggcaatgctggagagggtacaaatggaaatgtggaccatgctactggaaagtagaggagagaggatccttattttacagtggcagagagcttagctaaactgtggaaagcaaaactaagaacttggatatttagctaaggtgacttccaagcaaagtgttcaaaatgcaacttagtttcttttggttacttatgcagtcatgaaccatagaacaatggcttttgatttttgtttttttggttttgttttggttttgagatgaagttttgctcttgttgcccagactggagcgcaaaggtgcgatctcggctcactgcaacctccgcctcctgggttcaagcgattctcctgcctcagcctcctgagtagctgggattacaggtgtcagccaccatgcccggctaatttttgtatttttagtagagatggggttttgccatatcggccagggtggtctccaactcctgacctcaagtgatctgcctgcctcggccacccaaagtgctgggattacaggtgtgagccatcgcgcggggccagaacattttagtcaataatggactatgtatactacagtggtcctgtaagattataatagaggtgaagaattcccatcacctagtgatgtcatagtggccataatgtcttagtacaatgcactgctcacatatttgtggtgatcccagtataaacaaacctactgcactgtcaattgtataaaagtgtaacacttataattgtgtacagtgcctaatacttgatattgataataaatgactgtttcttgtttatatatttactatgctatatgaatggttattttggagtatcctccttctacatactaaaaaaaaaggttaagtgtaaaatcgcctcaggcaggtccttcaggagttattccagaagaaggctttgttatcataggaaatgacagctccatgtgtgttaatgcctctgaagaccttccagagggacaaaattggaggtgtaagatggtgatatggaagatcttggtgctgtgtaaacctaggctcatgggtttgttcgttttcatttttaacaaaaaagattaaaaagtttaaaaagtgacgtaattagaaaaacgtctatggaataaagatataaaaaatttttatatagctatacaatgtatttgtgtttcaagctaagtgttattatgaaagagtcagacaatttttaaaattaaaaagtaaataaagtcaaaagttacagtaaactaaggttaatttattatggaagaaaaaagtacgtttatgtagcctaaatgcccagtgtttataaagtctatggtagagtaatgtactaggccttcacattcactcaccactcactcattgtctcacccagagcaacctctaatcccacaagctccattcatagtaagtgtcctgtacaggggtaccatttcttagcttttatacattatttgtacttatattttctatgtttagatgtcctagcgttgtgttacaattgcctacagtattcaatatagtcacaggctgcacagatttatatgctggtaacaataggccatgtatatacagtgtaggaatgtagtaaactgtaccatctaggtgagtgtaaataatgcattctatgatgttcacacaatgacaaaatcacataaggatgtgtttttcaggatgcatccccactgccaagtgaaaaatgattgtacctgtagcgaagtgtgaaaggaaggaaatgaaagagatgttaggcaaaaataatggatttgggaaatgctcagcctgtccagattacaaatatgctaaaattaggagaataactgtcaggaaaacatgatctgtagggaaagccaagggtgtggctggacaaccttttgttactgcattaaaaagatcaaaagataagtgtattcggtcatacaaggggctctttgaacagattagtgcactttatgggtctccttagccatctccagagaaaccaaaaatagagatcagattatctaggaaagatccatggacgcaactcttgtttaatgggaaacattttcttgacgtacacaaggttcttcagaatttcttaacaacgtaaaaaactgacagctctgactgaaagggacagagactatgaaatgaagcataactgtcagactcacaaaattatacaggcaggaaatagactgataaactattcagttgcaaacatgtgctaccattcataaaaaaggaagcatgactcagagagccaagtctcatgaccagagggcagagcctgtaaccatagggaattattcccaggctttgaaacccaatattgtctggccatttgggttttgaaattgcttgcgattggtgactcattttttctttcaattttctctctttttgaatgggaatgtctatatactggtactccatgcctgtccgactattgtattttgaggagcagataatttgttttctaatttcacaggcatagatggagaggagtttggccccaggatacatcatgtttcactcatacctgctttacatgattgaggtgatgagacctgggaatattgagttgaagaaatgtaaatgagattttggactttgagttgatgctgtaatgggttgagacttttggggatgttgggatacagtgactgtattttgaatgtgggattgatacaaatctttatgcaacagagggcagactgtggtaggcacaataatgaccccccaaaaatgtctacatcataatttcccggacctgtgactatgttatattatgaaacaagggggaactaatattgcagatggagttaaggttgctaatcaaacgaatttaaaattggcatttgccttaaattattccttctctgatgttaaaattatgttagttggtttctttttgtttacatttccctggtatgcttttgcatatcatgttattttcagcttttcaatctgataagttttattttaggtgggtctgttgtatgcaacatagttttggttctttgaaatccaatttaatatattatttttattataatgtgtgagttaagccaatattgctttttttgataaatatatctttttgacagaaatatgtatatattattttgaacagatatattatatatatatttattttatactttgtaaagccttccttgaggtgttttatctctttgcttctgtagtgtgcatgtgtgtatgtagatacacacatctagatcttctgatatttaggaaaatttttgttattattctaagaaagtcccccttgtcttctctttcatttgctaccacaaatacttcttaaacgtaaccatgaggaagtgaaagactttttcacaggaaactacaaaagattgctaaaaaaattaaataagacacaaataaatggaaagatatgcatggattggaaaacttaatattcaatatttgtggattagaagatttaatattactaatatgataaaactatctaaacaaatctgtaagtttcaattcaatctttattaaattccaacaactgtttttggaaaaatggaaacatggatcctcaaatccatatgtaattgcaagaggtcccaaataaccaaaacaatattgaaacagaaaaagaaattttaattactcacattttaatacttcaaaacttactacaaagccatagtaatcaaaacaatgtggtaccagcataaggacagatattaacatatagtcaggtgcaatagaattgagaatccagaaataaacccaaattattttcagtgaagaagccaagatcattccatgggaaaaatagtctcaacaaatatttctgagaggactggatatctgtatacaaaatgataatgctggacccttccctcacactatatacaaaaattaattcagtataacaatgacctaaatataagaggtgaaaccataaaattttaaaagtaaccataggagtaaatctttatgactttggaatttaattcttagctatgacatcaaatgcattaccaatgaaagaaaaaatagattaattggacttcaaaatttaaaacttttatacatgaaaagacattatcaagaaagtgaaaagacaacatacagagtggaagaaatatttgcaaattatatatctgttgagggcctagtatcaagaatatatacatcttacaacttaacaaaatgcaattaaaaatagatgaaggccacaaatagacatttctcaaagaaaacatacaagtgaccaacaagcacaggaaagtagtcacatcattagccattacaaaaatggtaatcaaaatcacaatgagatactatttcatatccagtaagatggctagaattcaaaaaatgtagataacaataattaatgaatttgtacaaaaatgaaacccttgtacattgctggtgggaatgtagaatagtgcagctgccaaggaaaacagtttggtagttccaaaaaagctaaacatagaattaccatatgacccagcattttcattcctggatacataaccaaaagatttgaaaacagatagtcaaaaaaatgcatgtatacatatgtttatagaagcactattcatgatagccaaaagatggaaacaacccaaaagctcatcagcagaccaatggataaacaaatcgtagtatactgatacgatgtaatactatacatccgtacaaaggaatgaagcactgatatacaccacaaaatggataaatctctaaaacatcatgctaaataaaagaagctggatgcaaaagttcatgtattgtgtgattacatttgcatatgaaatatccagaataggtaaatctatagagataaaaaagtgacttgattgccagggactggggacagggagaaataggaagtaactgcttactgggtatggggttgtattttggggtaatgaaaatattttagaaatagatagaagtgatgattgaaaaacattttgtatgttctgaatgatactgaatttttcactttaaaatggttgatgttatgtaaatttcaccttaagttttaaaaataattgaataatttttaaaaaaacaatggagaggagatgcttgatgcaggtgaattgtaaacatcagcctgagctgatgtctctacaggactgacttttgctagtcctctaataaagccaaccaggtataaatgcaaaaaacaaaaaaattattggattacttgattaattaaatatgattgtaatatagtctctttttataccttccttaatttgactttatatattttttacaacaatatcgtgagtgatattggcatatattttcagaaatctttcagtctttgactggttttagtattgttataatatccttaatcggaaagttataatatcctcagttggagaatattcattttttaaatctctggttgagtttatataagataacaattatctgttctatgaacacttgttaaaccatctggtaaatctagtattattttagtgagtacattttaaactactgatttcattgttaaatatactattgttcagatattatatttcttcttcagtcttactaattaagcttttctaagaaaatggttaggattaaattttattggcttggagttaaaatttattggcatcaactttttcatagtattttaaataattttaaaaaaaatttatcctgtatctgaagttacattatattttaattttatgctaaatattgtttttttgtgccttctctctttttcatccatgacaataatctcagaggattgaatatttcattaatgttttctaagaaccaagttttaggttggttgatcatttttattacatctttcccccaattttattattttttgctttattttatgtttattctgtgttcttttctattttcttaagttgaaaataagctcatttattttcagcttttctcttttttaaaaaatataagcatttctgggaataaatttcctcctaagaactctttaagctacttcctatgaatttcaatatctggtatttttctttacattcaaataatatgttttaagtttcatttatgacttctttaacttcaatttccttagaagtttaaagtttttagtttccaagtagttggaggtagatgtgttggtttttttaaaaaaagattctaatttaatttatgatgctcagagatgtgggctatatattaatttttaaaatatgttgagacttacattattaactagattaatttttaaatttccatgtatgccatcgaaacacattctcctctgttaagaaggagaccttatacatgttcattagaccaagcatcaagcatgttaattgtgtgaaaatattctaaatctctaacaaattttgccagcttcttctattaataacagagtagtaagttagattacaaagagagagattcacatagaggcgagagatttctttttatcaatttactttctatcttgctatgttacttactgtacaaatttcaaattattttatcttcagagacactgactttctttattcctaataaagatttatgcctgaaaataagttgtatcttacattactataacaacctctactgtgtgttagttaatatttgtttggttaatctcctactatcttttacttttaattattcagtacattcatattttagaaaaacgtgttacaaaaaagatatcgatgtttttctttttaatttaatagaaagtctgtttttttttaacctgtgaatttacatataatcactgatatatgtggaattagtgtcatcagcttatcttgcgcttgctgtttgtcttacctttccagtgctctcccctactttcctgccttctgttggagagtttagatatttgattgattgtttagaattggattagttggatattttaatcagtatttaattttgttttggccatttttctgagaatagtatcatctatccatttatttatttatttttctttgagatggagtctcaccctgtcacccaggctggaatgtgcaatggtatgatcttggctcactgcaacctctgcctcctgggttcaagtgattttcctgcctcagcctcccaagcagctgggatcacaggtgcccacccccatgcccggctaatttttttttttttgtagtttttagtagagacggggtttcatcatgttggccaggctggtctcgaactcctgacctcaggtgatctgcacacctcagcctcccaaagtgctgggattaaaggcatgagccaccacaccagcctatccatttcttttaactattccatatcactatgtttttggaatttctcaaagcgtaatgctaggttttgtatctagttttagaataattgtcttttaaaagtaaagtttaactcatttgtgaatctgatgtcagtttagtgctctagtctgtgtatgtatatgtatattattgagagattatcttagtgggcatattttcttttttaaaaaactttaggttcgagggtcatgggcaggtttgttacataggtaaaatcatgtcaagggagtttgttgtacagattatttcctcactgaggtactaagcctagtacccaattgttatttttttctgctcctctcccatccttcaccctcaagggggccccagagtctgttgttcccttctttgtgttcatgtgttataatttagctctcacttataagtgagaacatccggtatttggttttctgttcctgcattagtttgctaaggataatggcctccagctccatccattttcccgtaaaagacatgacttcattctgttttatggctgcatagtattccgtggtgtatacacattttctttatccaatctgttatagatgggcacttagattgattctgtgtctttgctattgtgaatagtgctgcagtgaacatttacttgcatgtgtctttatggtagaatgatttatattcctctagatatatacccagtaatgggattgctgggttgaattgtagttctgtttttagctccttttacttttaattgacaaatactaatcctttatatttatggagtacaatgtgatgttgtgatacatgcatacattctggaatgattaaatcagactacttgacatatccgtcactacacatacttatcactacttggtggtgagaacatttaaaatctattcttttagcaatttaaaaatacacaatacgttattattaactatagtcaccacactatgatacactgctagaacttattctccctgttgaactgaattttgtaccctttaactaacatatcccctttccccatctaccctgcctcccagaatggtaattcagaattccattgattttaaaagtgtctttaaattttgacttccgatggcatttcatttggatcctagggattttcaataatgttagatgagtttttataacaatatctagacttatggttcttatataggctgtgtaaattcagacatcactcttgtgcatggtgactttcctttattactttttctaccatagtccttggactgacttcaagcctcctcaggcaacacttccagttccattctattggattttgtaagacttcaaatatcccagttttctgtttgggtctcagcttcagctgtctgacttctacgattcatgaagccatctttcacatcaccagatgggtgttagaatcgatttccagtctccagggccttacaggctattgttgataagcattccctgatgcatatcatttggctttgatttctgtcaccattgctagcacctgggaattactttttgtttcttgattatatttcattttttgtatatacttctgtattcaggagaatatctgcattaacttagttgactacattgtgaaacgtgtaaacaattttttttttttttgagatggagtctcactctttcgctcaggctggagtacagtggcgcgatctcagctcactgcaacctctgcctcccaggttcaagcaattctcctgcctcagcctccccagtagatgggactacaggcgcgtgccaccatgactggctaattttttgtatttttagtagagatggggtttcactgtgttagccaggatggtctcaatctcctgacctcgtgatccgcctgcctcggtctcccaaagtgctggtattacaggcatgagccaccacgcccagccaaaaagtccaaacaatttttttttaaatattctacttttaatgcaaaacgtcaggggatactttggatacttaggatgaattagcaattcatagaactattgaccccaaactgatgaggacatttttgtttttcttcaaatggcaggatctagaaattagagattagaatcacttgcactgggtctgttaggggggatttgttaatgagttactaaaccattggattcacgtttgaaaagtcacaaattgctgtgctttgaccttttgttcaaataagaaaaataaatcagtttttaaaaagaactaaaagagattctgacaacctggttggcatctcagaatacaagggagcagccctggaaaattaaccctctatatgtgcactgctgactattctgctaccatggtctttagatgctcatttcttagtctctctttccctttcactctgtgttcttttcttcctttcttctgcaaattactgaaaacatacagttaccttctctgtggtgctgaagaattattcttgttgcctgaggcccctgagctgggagtttcattttagtcattgcaatgacactgcaacccaagaaactgcccagccaggcatgattgccaagaatagctcaatatcctcacaatttagtcataactcattcattctctacattcattttataaacccctaacttcttattattcatgatacctaccctccctgactccatatatacttttgtgcccttttcacatatgactttaaattggctgagggtcagactatctatggtccttattaaggaacactttttttctctcttttttacagaaattgtgcatagctcttgcttccagtcacctgtctgaagcagagccctactcaactccagggctgctttagaatgagagatcactaaaaaataggtggtaatagaaattttagtaacgaggctgagcctattggatgagttcactatgggacctagtgaagccaaagtctaaaacttcacattccactcaaaccttgcagaatttcaacttcaaaactgggtccattctaacagaatcctagtgaagtcctgtagccaacagtttgcaataacacaagatgattttgaggccatatggaaaactctcagaacaaaatgttaagacttttctggaggggactttgcatatctttgtgaggtgtttgaacagtgaggtgtttctgagctcctaatgacatagaaatagggtctactgagtaaggtgtgaggaagagagctgtggcttgctctaagccctgatgggctcatttatttctctagttttgctctcagaagtgactcattaatctaggttatcaaaatgggaccgtcttctcgtagaaaatgtcatcttcacttcctagcaaagactttacaaaagctatgaaaacacatcaaaaatttaggtatcaaatatacagtagatagctgaaaaacaaaagtgtctactcaaatatcctttcttctgattaacgtaaacctgcttagtctagagtttcatggcaatgggtaatgttcagtcatagctgcttgttcctgtcttaggatttttgcacaagctgcccaaagacttccttccctctgatcttcacctggcttgtgccttcatgtagctcagatcttagtgttaagtgttttctcttcaaagttgcttctcaaagcacttgatacttttcctggccacccaatcaaaaatatattcctcttcattcctattacgtgactctttaaaaattcctctatctaacctacatcaccgtgtgataatttattataattgtaactttaatatcactttctccttccatccacatatggatttacatgcctggtaattttttattggatgctaaacagtgagaattttaccttgttgagtaccaagtattttgcattaaaaaaaatgttctggaactagttctgggaggaagttaaatatttggatcctcttatattttgcttttatggtttgttaggcaggcccagagtggtatttagtcaaaagccaatttttcttcactattgaggcaagacccttcttaatacattatccaattctccttggaatataaagtttttcactctagctgttagaaacagttactattcccaacaatacatggcctccaggtgctactccttcaaatcatattggttgattattcctcagcctcaggtaatttcattaaataaatggctaatattcatctgaatacttgtgggagatgtactgcagaccattctcttttgccgtagcatctcttctgcagcatttgccctgtaaaccctggcctccctagctttgctagacttccagctcctttttctcaactctgcaaatccactgggctgtacctgagttccccacaacctcaaccttgtgccatgatttgaaaacatccaagcagtacgccaaaaaaaagtagtgttcacctcatttcttgctcaagaaattaataaatttattcatttgataaatgtcaaatgaatatgacacgtgctatatttcttcaaccgttgtgaatatggttaacattgtaaataaaagaatgtcatatttgtttacatatgttttaaaaatatcgtttgattatggttttcgtcttttccctattatattgtaatctctggaatattttaaagaattataattttattatcaggtacacacaattacttgaactcataacacaaataaaattgctttagcacctagactgtaattattttaattgaatgaaaataggtttttctaaaatgtttttgcacatttaaaaaatactattgtatttctgttttttactgtcagtttgctaattaaattagtttaactgatataatgcaaaagtaacattcatacagcccctgtcaaattgtaattggtggaagcagaaatggtattttcctgttattaatattagaatgtataagatagaagaaatcttctaactattcaggtttgaaatgtgaaattttataggttgattggaaaatagcctcatgaagaattgctgtataaaaatattgagggggaataggaaataagaattctcgtatgttagtgagaaatacttaagacatacagctttctgttaaacagttcacaatatatagttttatttccagaccccagctagaaaacggaactcataactgagaagcagatggagcagcagaagctgctagaggcagtgaatgtgcttcacagagagtccagtgctgtctgaggctgggtcactacccagcacagcaggattcactccagacacttggcgagtgaccaggtacctgcaggtcatctcaggtcaagcacagtctagtttacaccctgccaccaccatctaagaaagatcctctaccaggaatcagatatgttgctggtttgctcttttaaagtgtacttcagagaaaattcatcaaaacaacatcctcacacagaatcctaatgcaacgaaacagcaaaaatcctttaaaattttctgaaaatgcatttgacaggtgatacaaagatgaaacactttgaaagtataaaaacagaggattgctttagagatgttttctagtgactttttttcatgatagcattctctaacaccttacctgtgatagatttaagatctcatacaaacctttagcaattaactctttaaaacatatccaccaagaaatcctacttgaatgttttccttatatcctggttctccttgattttatgacctcttagatttaacaacaactctaacttctgaaagagcaggcacctatagtgagggtgaaggtctttaactagtggttaaggagacttagaattccagaccactaaaccatgtgacttaaaatttctacatattcacagataaagttttcgtcctataaagtgcccttcaatgctggtgggctcaagggcaggaagtcacacttttctctccttctagaattgacacaaagcatttgcctttacaaactaagctgtcatgtgcttttaaattgcacatgaacatcacagcaagttcatttcgtacacatttttatgatggtgactttcttgtacagactgtaaacaaaacaaatttcacatcttattaaaccttagggagaaacacacttcaaccctaacctttatgtcaaaagcagttatttttttcaagttatgtcatttcaatttttaaatatttacccttagacagaatttcttcaaagcctaactggtcttatttttatcctcctttgtgtcatgaactatagctcaaatcttcaaattgctctagatgtagttaagatgtaaatataaatacatttaaatgtaaataaaccggtttgagcctttctgagcagactggacatatgaaaaaaatgaatgagtcagtctttttaaaatcaatttgactggccatcatattcagcgatggtaagcagaggactcactagaacaataggcaggtcatttaccatgagggaggagagcagaatgacctgattgagtaataggcttacaacactttgaggacttcccatggtcttcagactaacagtgtctaggctgggatttatgcacccacccccatcgcatgccatacttctttctattctctagctatactaactctttctaagttccttgaatgtgccaaactttttcttgtatgttaatctgccaggaaccttctataccaaaccctccccttctcctcacctgactaagcctgactcctcttttgggtctcagctcagccatcaccttcttaaagaagccatctctaattacctctgtcccccactacctcacacacacaggcgtgcgtgcacacacacaagcaggcacacgtgtcatatctgcacactagattaagttaaacccccaagctatcgctccccatgatactggtcactttttttttttgagacagggtcttgctctgttgcctaggctggagtgcagtggcaagatcatgactcactgcagcctcagcttcctgggctcacaggatcctcccacctcagcctcccaaatagctgggaccacaggtgtggaccaacacatccagataattttatttatttatttatttatttatttattttgtagagatggggtttttccatgttgcctaggctggtctcaaattcctgagctcaagcaatctacctcccttggcctcccaaagtcctaggattaaaggcacttctttttctttagcctcatagagtttgtaattcttttttagtgtctgttttccccacaaggctgtagcaccgtgggggcagaggatagtgagtcttattctcatttgaattcatagcagaacatctggcacacagtgactgctaggaacacacagaagtagcaaagaaaagaagaaagaaaaaagaaagaaggaagaaggaaagaaggaaggaacgaagggaggaagggagggagggaggaaggaaggaaggaaggaaggaaggatctatacaaaaagagtctctaccctagtggatttggaagcatataaaaaatacattctctgatgtggctggctagactctactgtagctcaaagtccctttagttctgggtcaggttaagtcagctataccttcagcaacccctgatctgttgaaaatgcagctcatgtgtggttcaatgggaagattctagagaagaactgcactgcttagctcagctaagagtacatttatctcaattgatctcaggtaaccaagggtgagatatggtcactaatgtttgcccagtcccttctctgtgagaagcaagcaataaaatgctttctttggcagagactgcatctttatattccacaaacttcagggcaccactctgtgcagagaagaataaatccatcccctgaccaagacagccttaatattctcttcagcttgactaaactttagacaggtttcttcctgagtacaggcccctgacgtcccttttctaagagcatttactttggaaaacctaaaactgtaaattatttctctgcctttttgagatgtagatcgtctagtttcttgctaatttcagaaaccaaggaagttttactgaatgacaaggacctgacagccatccctttaaatgtaatcatcaagaatagtggtaaacccctcccttccagtttctgtgggatggcaggagtctaatgtgacaattagcaaacacagatgcctaatcacatgggccgacctcgtgccagtggccctccagtacttttccactagctcacccgggactaaaaaccttcccatcttttattttagcagagttgggttcagtgtctctcatatgttgtaatagtcttgaacagagtcttctttgcatgtttagctttgtctggtggaatttgtctttgataccctcataggcctggctcacatgtgcacctgaattaaactggggctacattacgtctggtagataggaatgttctagaaggtgatcacatttcaaaaattctatctaactgaataaaatgtcagtgtgctcccatttagtgagaaggagaattctttttataatttgagatgagattgtttttctttaatgctgctattttgaagtaacattaaaaaaatgaaaatatctggctacttctatgggaggcagatttgaatgatgtcccaggaggaaaaactgtggttggcatgtttcagaactatatcagttttcttatctatgtaaggtagctcatgtaatgatcttcgttgcaatgctgaaaccttgttgagctcttattttgaaggtcagcctctgaggtacctagattttattttcttctggtttggagagtgactgataggctttgtggctgaatgtcttccctctcagtaaaagtgaatggcgcagaatctgatgactagtgaatactcatcgaactttaattgtaagtgttgctgtcatcatctcatcatcactttcacaattgtgaaaaacaaagaaacaaacaggatattatgctttcaaaactttctactctctaccaaaaaaaaagttgatgggtagtaatgctggcttaaaatagtctgtagccttttctggattgcttcattcatatataactctgagctctatttgtgagatgtttgtctttctctctccctaccccaatccctgcattttttagtgatggatgggcagacagagatgaagtcattgaaggttatgaggtggaagccaacgggggaatcacgataaagctgcagtctccagaggtcaggtcatttgatgattatttcctgaaactgaggctggacactaacacgaggaatccctggttccctgagttctggcaacatcggttccagtgccgccttccaggacaccttctggaaaatcccaactttaaacgaatctgcacaggtaactcatgttcacaaaataacaactcagaggtttggtcatctcttctagatttattgcaacttgttgaatgagaatagaaggtgccagggctagagatccaaagacaaaattgccatctgtgtttataaaatgctagaataaggaggaattgtgtattaccccagggattcatggcaatctggaaagacaactttggtctctgttggagcaagtgatacgagataacagaagtaaaggaaaagcaaactgaggagtcaggtatctagtatttaagacagaaggaagagattttattacaaacatgtttaggagaccttagccatagacataagtcagcaatactggttagatcctcttttttctttgtggcttgtttagatacagaagtcaggagaagatgaggtaatgtgaccctaagccacacgaccaacaaaagtgtttgtgggcataggggccaagaaactgcactctgatctttcagtcagaacaatggttcacagctggacagatgagccccatgcactactcactgatgccatgacaggaaacagcagcacattgttccaagttcttcaggggtgtggtgaaatccacaggatgtcctccttgcaacccctagtactaccataacccagattctgaaaactgtaacttttatgagtattattattactgcatagggacattgctgtcccctgtccttttcagtattttctatgctgccaagataaatcatctatgtcctttcataatgccattcaaagccagttgttcttactgggtcgatagcatagaataatggagcactcatgataatgggtgatggaatctatccatgacctaatttgtattgtagaacagtggtgcgacatgtatatcctgtatgtaggctacgcagatattatttataaaggtatagaatcatattacgcccatgtataaaacactgtatatagcaaacaaagggggatagagaagcgtataatccatgactcttgacctagagaggcttgccatctctttgggcaaatcaaaacagatcacatacatgaaatagacaaataacaatagaggacaacgagtttttgcaggggatggtaagaatatggctaattacataaaatatttctattttcaatagtattcatagtttgatgttagaaaatgctttcagataccaatatatgtaaatgcatcaatgtatgtttggcttcataaggttcagcagagttcaatgggaaattgcctggtatggatctattttcaaataaggaagtttcaatcttttagaacttcctcagtgtggcttctagggaggcggcgaaaggcaggagaaaggggagacattgctaaacaataacccacctctgccacgtaggtgtttctactttctctgaaataatagacatctcctttctctgaaataatagataaaccaagaataagcattctaatgaaccaataaatcatccaagacagtctccttatttgcaaaacagaggtgatgagggtgaacaggggaaacagtttccctaggctcataaggttaatggcagcaaagaaacgacaacccacacctcctagacaacatagtgcctatttttagacttagtatttggtaatatattatctctcattgctttctaattgtttcctaagaaatgtttgccatcttcaactgtaatatctttgtagtcaaagcatccttacttgcttcatagaaccctatacaacatggatctctgggagctcagtcaattcttgttagctaattgatcagttaatttacattttcattcagggtagggagttttgctgaagggcccaaggagaagagcagtgaggagcctactgaaaaagcaggtgaaggtggtgaattgggcccggtagtgggaagcaaagtggagagaagtggtttgatggtgaagacatgttgagtgaaggttgagatttgctgacagaattgtcaagaataactgtaatctgagcaactggaaagatggtgtcaccattgactgagacagaggaagacttcaggaaaaaaagattagggaaagtccaagaggctgattttggataaattaagtctgagatatctgatggtggtccaactacagatgtcattttgtcattgtgttttattagtaaaattcaggatactacttatgcttagatcatttatataaggatttctaggaagatattttgttgagctctcaaaacaagttaaaactctgcaacaaggtacactaatattttgggtttttaattgtgacagtacataaatgtcaaggttaaagcttaaactgtgttagtattcacagcaagaaataacaatttacaaatcttgatttatttttatgctgtgcttgaatctcaaagctgtgtttaagagcttcttatatgattacaatctttatgaaacatgtttatatttgcatttcattctggagtcaagttcagcaaatatttctcttttttaggtctaaggaaggcaggaggtttatttaacttttctatttgaattaattcataaaacttatttatgttttatgcagcaaaattcttatacttttatctttagcagtgtttatctatattatctatgatgtatacattcatgtatacctaccttggtcttcggttttaatctctatatttctgtgaaattggcttcaatgttattgaagaacaataaactttcacttcatgtattattcttatccatttgagatccttgaatatcaaatgaattccataatcttctaacaaatatgcagacacatctatgaaaattagtgtgaggaaggagaattaacctttccatactattgatagctactgtttctgtcactcctttttacctcttctaattgggtcacttctagtggtttggaaagttttgatattgctattagtttccatagaaaccattattgaacttaatcccagatgtcactatttaaataaagagtttatgtgcactagattgccagtttgaatattaaaggtcccaaacccaggctgagtagtttaggaatcactgtggctaattaaaaagtatttcatgtaaagtacacatcactgcttaattagttgagtatatcaagggattggaggtgtgttagaaaagcactaactgaaacatcaaaacataacttctaaaaaattaatcattgtaggacagtggaaagagctgtaaagcaaatcagagtcactctcttccagtaaatgtcttagctgcttaaaagatttgtatcatgtttgcaatggcatagtgctttttcattcctgatgagacttattagaaattccatagaagctgatagggtgtagcattttgaagcactatcactgggtccaataccagttcagttatgtatcagccgcacgacttgcatgacctcacttaacctcagaacctcagttttggtaacatgacaacaatatccacctcacacagaactctgcatgaattaaatgaaataacacaaatgaactactttacaataaaataatacaagtgaaatactttgcaaactgaaaatacttaacataaatgtaaaatgttactactagtgtcatgtcttattagaaaacagggcatgacatagatcatttcataaaaattatatattttgtaattgtaagtttaacttaactacatcccaggatgtggaaactagaaaaaacaagacaacaatctttaatcaatcacccttacatagttagtgccaatatagatattttctcttatattttcccatgcagtcttttataatttttttctgatgatgaaagtaatacgtgcttaatatgctattgcatgcacttggaaatatacagaagcattagaaagctgaagagaattaagaatttgctcttatctaaacatcattagtcactgttaaaattttggcatgttttcatctttctctatatagttttaaattatgtattaatattattttatatattgctgtattaaaagaaatgttttatacattgatacatttgtctttgtcgttaaattcttttattcttaatggctgcttaacattttgcattcacataagctataatttaggcatttcattctttctatttaggctgtttttgcttattcacaattttcaaaaatgttgcagtgatataataaaaaaattttcattctaaactttctttttttacatttggataattttcttaagttgtatttctagaagttaaatttctagaagtttaatcaagagatataaacatttctggctgggcatggtggctcatgcctgtaatctcagtgctttgggaggctaaggtgggcagatggcttgaggtcaggagttcgagaccagcctggccaacatggtgaagccccatctctactaaaaatacaaaaattagttgggcttggtggcgggtgcctataatcctagctactcgggaggctgaggcaggagaatcgcttgagcctgggaggcagaggttgcagtgagccgagatcgcgccactgcactctagcctgagtgacagagcgagactctgtctcaaaaaaaaaaaaacagaacatttttaagcttttgaaaaggagttccaaaaggcagctcctactaacgctgcttgaaactctatgcattcttttcattttattttgcataattatcatcacagtgtgcatacaattctctatcttatttcactcaggattatattttacatagttttgatgttgcttcatggtctttataaccaccattttaaaagctccataatattctaaccagttaaaatactataactactggccattcttatgttgtcagtcatttagacgacttttaattttccttcttacataaaaaaaaaagcactgaatatgatacacagatttttcacagttgttgttactgttttgggattgttcctttacagtagattcctaaatataattattagtaataacttgataaatttggggtcccttaaaaatataaactgcattttcttgcaatatggcaatatttgcatacttaatatttgctccggctagcagtatattaactgtatgagttcatggggtttattctgtccttatcagcctttttcacacctcagtgaagttatagccattattttattttctctccatattctttgtaccaattgagaacagatggacacaatgacttttaaaattagtctatattacatttggctattttagaagacataatgaaagaatctggctggtatctaattctcaccaacagctcaggactggtaagatgatgatagctagtctagtgaaaacattttaagactttgaagcaaggggactcttactccaatagtttggaggctgccattcacaattttagactgatactaattttcataatatatttgccttattaggtttcaaattttatggactccacttggaattaacttattttataaggccagataagatcagtccattagagtttgatccagattaagatgttccataaactgagatgggttccagtttacttcagcccattaggtcctttggtaataacttctctttatcttgggaagtttgacccaaatgtcaatatgcactcctgaagaatatcatttgctttcaacccagaagttggtattattagttggggtttgtggaagacattacatttcttcacccctttttgtatccatgctctttgaaatatggctttgtagcatctctcctcgagaggtagagttttgttccctacctgttgaatctgaattgaccttaccatttattaactctaagtttaggccttaagagacttgacctactctcattttctttcctggaaccttaccttagccatatgaataagcttgaatttatctggtagaagatgagaaataacatggatcagaaacaggatgacctctcagttgagaatgtcctagatcagccagtccctggccaacccaccacctgacagttgacgcctgagtgagccaagctgagatgagttatgtccaactcagagcagcagaacttcctagttgactcctagattcatgaactaaataaattattattgttttaaaccactaagccctgggatggtttgttatgcggcttttttggggcaattgataactgataaaggtattcatagctttgtaatccatggagcaatagttggtttaattaaattatgggacataattcctcaacccaatagtagaatgctcagtcttttcccatcataagaagaatggtgcaatattgcacccaggatctcgtcgagcaaagccaaaaagttttatagatcctgcaatcaaaagaattttaaagcccccttgatcctaggcagttaaactattccacttaggaaatctgctgtgcatacaggaagtgctgaaaaaatgaggtacagttatagcttagtcaaacaaatactctcaaaataaaacagtcatatgttctcatacagtgctgttataagttgctttatgggaataggttttacaagtcttagaagtgtttatatatcttagttggaagaatgaaagtgaactgactgtgtgtctcatctggaccttataatttctcagacaaatctgattatcacacagatgaagctctgagagtaactattcaataggcacaatattggcctacctatctcttattaacacttttgattggcactgccaaatgtgttagccactagccacatgtgtctatttgtatttaaatttaaatcagtgaaaatcacgtgaaatgaaaccttcagttcctcagtttcactagccacagttcatgtatcaatacaggtactagaatatacatttttctgtttaaaatagtttatttcttataaacataatagtaacagtgatacatgagtaacagcatgaacttacaaattgtgaaaaaaaatacttttggtttcgtagttttacatagcatgataggtaacaatactttgttaatgtgctgttttgattgatcatatgatttttcctgctctattttctggaaccttatttattaggtgattgaaatttatacttttagtaacctcattttcattacatatgattgagaatgttatcatttgctcttggaaaatgcaagatcacacataattttttattttaattttgagaaggatctttctgctgatgcaattgttacagtaactgttaagaatatttaggcctggtgcggtggctcacgcctgtaatcccagcactttgggaggccgaggtgggcggatcaagaggtcaggagatggagaccatcttggctaacacactgaaaccccatctctactaaaaacacaaaaaattagccgggcacagtggcgggcacctgtaatcccagctactcaggaggctgaggcaggagaatggcgtgaacccaggaggcggagcttgcagtgagctgacatagcgccactgcagtccggcctgggtgaaagagcctgggtgaaagaactccgtctcaaaaaaaaaaaaaaaaaaaaaaaaaaaaaagaatatttagtaagctttgactccattgagacaaattttttgataaatcatcccaaaagacaaattttagcatagagttgatgattatctttgaacaacttttctaaaaagatttaactcttcatacagatctggtttttgcaaatctgaatttgagtgtaaatttatgaaataaccattttaatgtcattcttctgacattttctgtaattagtgactaccatattggacagcatagatgcagaaaacttctactattgcagaaagatctattgaacaatgctgctctagactgtgttctattttcctaactccacaaatgcaagtttgattgtttctgtagtatttggatataattcacaagttagtgatttgagactgatcaacttgttgaatatcctgacgaattacaacagctgaaagttgactcactctttggtatgagccaacgctgccagcttgcttggtaattcctacagatctgatgcccaacatagggtggactggttcccacacagaccaggcatgtcttaaagagcctagttaagttctttaatccatgtcatttttaatattggatggaatcagagaaacatgcacatgttctgtcatccaaaaattataaagattgatgcaggggcatgagttattggttcttttaccttatattcatcttgatttgtttcccaaaagctcaaataatttttagtagcagatacagacttgaggtataaaaatggaaattatctgaggcatctaatggcatcgagagagtaaacagttactattttatcttttatatgcaagtgaattttatttttactatgcctgcaaaccagttacctagagattgacctaagtttcatatactttagttattactagaatttggttataactattaataagttctttaattagatcagttttcttcttattgaataaaatatgtatttctgaagttgaatggtctgtcatgtggttcagcttgccttccaaacaagtttgaagtgagtgttttcaatgattaaaatctatgactgttcataaatatttcaccctggatgagtatctatttaggttagtatctatttagattgtttctatggcattttcccatgtcgtctaaaagtgtcgcttctcatcaggagaatagttttgtatttcacgccttgtatacatttgctgctgggaaaattcatataaaataaagtcatattttcagccatcataaaaagtaacagttgttcaggatgggtgtgacccattatacttggggtctggcccatttactcttttcttcctttttatagttttattaaggtataatagctacattacacacatttaaagtgcaccaaaaaaattgatcaattttgatgtatgtatatgcccaagaaacatttactgcaattaagatactgaacatattgcttctcaaattcctttgtgcctcattgaaaatccctctcgtctacccctcttcatcccatccccaggcagtcacttattgattttctgacactatattttatttgtaatttctatactttaatataaattgaatttttataaaagagtacattataaactcttttctgcctgccttcttttactcagcacaattattttgagattcatgattgcactgtatatatcaatagttaattccttttttttttttttttttttttttttttttttggagacagagtcttgctctgttgcccaggctggaatgcaatagctggatcttggctcattgcgacctctgcctcccaggttcaagcgattctcctgcctcaatctcacgagtagctgagattacaggcatgtgctaccatgcccgattaatttttttttttttggtatttttagtagagatggggtttcactatgttggctaggctgatctcgaactcctgacctcaagtaatccacctgccttggcctcccaaagtgctggaacaacacttaactcctattaattgaagagtagtgctccattatttgtgtatcataatgtggttatttattcacctggtaatgaacatttgagttgtttccaggttttggttatttcaaataaagctgctatgaatatctttatacaaatctttgcataagcatattctttcatttttctttggtcagttctttggagtgtaatggctgcatcatgtggtaagtgtgtgtttaacttcttttaattcacctgttggtcttattcactatggagatatatgattgggaaaatagcatcacaaagggattgaacactgagaaggcttgttaaagttcaaataccagtgagacttctgaactgcttcttgaagagtgtattccatcattccattttttttttatttgcagatggcagttaaggtgaaggggttattttatgttcatattatgagccaagtcttgggtcataatagctataaaacatgatttctaattagctagatttcttattagctactatggaatcaaggttgtcgtatctctgaacaatttcctgagtatgttccctagtgattaattctccagtgactgcgtttccgaaaaactagcctcttacccaaagttaaaatattcatttgtgccctaatgactgggagattgccttgtataatcaacccacaagttatatttatggtatagttcccatgtctctaggccacagtaatgcactggggagttatattttatatccaagagctatttgtcaaacttcacaccaatgagctgtgtgaggccaggagttcaagaccagcctgggaactactgcaagaccctgtctctccaaaaagttagctgggcacttttagaggacatggaaaaatgccatagaaacaatctaaatagatactaacatgcacctgtagtcctagctgcttgggaggctgaggtgggaggatcacttgagcccaggagatcaaggctacagtgagctatgattgtggcactgcactccagcctgggcagcagaatgagaatctgcctcttaaaaataaaagtaaaaaagaaatgccagtgaattgaatccttagagatgtaaatagatctggactgaatactccagtcagcttaatactattatgcaatccatttggctaaattaatagcttaagcctttgaatgatgtaaataaaaatctggtccttcagagctgtagttctcaagcatggcttattaagaccatcgggaaagcttttacacaaaactttcctatattaatctgggtcctacgccatacaaatagaatcagaatctttggagtgaggccaagcatttattttaaggacaagaagaaattcatacttaaaatttatgagccatttaaattttcaaaattcagaaccatctgtcactgtccaagttgagagcctgctaaggttttggccctggctgtggcatctgagatagctaatgagattttagtaattcatgatctgaatcagtctcttttgtttatttatttattggtaggcttgttttgcatttgaagtattggcattccgaaaccagtaagtcataaccaaatactgtatgcctccctgtccagattgggtaattcttagatgtattaattttgtattgctgtcataacaaattaccacagactcagtggcttgaagcaacacaaatttattatgttacaattctgtaggttagaagcctatgacgtaacctctaagaccctgacaagagtctccctggggtaacattagagggtcagcaggcctgcattccttatgaagaccctaggagagaatgttcccttgctttttctggcttttagaggccactcacgtgtcttggctcatggcccccttccttcatatccaaagccaggaactttacatctatctgacttttcttcctcaaccacacctctctctggacgtgaccagggaaatttctccactgttaaggattcatgtgattgagacctaggtaacccaggataatctctccatctcaagggacaattagtcacattcgcaaagtctcttttaccatggaaatgaatttattcacaagttcagtgattaggacgtggcatctttgtgggactgttacgttgtctaccacactaggtgtcaagacagcacggcatcagcctctctaagtccctaccggctgattctttagtgccttctactgctgcaggctgattctgtaggatataagtctttggaaacagattcgaaaagtcatttgtattgtgttcctgtgaaaggtaaaacatccaggcagttgacgacatatatttcttgcatccactctcagggaagtctcttatttcgcatcatcatcctccttggcgtcctctgacggagcatgctcctctgattggggactgtctttttgagggccgggggactgtctttttgagggcctggggactgtctttttgagggccaggcggctgtctgcctctactacctgaccctaaaatgttgaaggcccaaggtccatttcagatatttgatgctcacagtctcttttagtctaggctgccagctttttaatttttctaagaaaaatcttattttaaatgtagtttcctttttaactagtttatcaggcacaacctgcgttaatagccatgcctacaattcttgttagacaagcctcgccttccagacttactttgaggtacattgaacctaacagactcctagtgaaaagccacagtcttagtctcttgtttcttagccatttccttcatctgaaagatttatgtgtgccaaattattattttcagagatttttaacaaaagaatatgagtcttgatatggttcttgccattaatctgagttttcatgggtcttttgtggtacaaagaccttgtcagcttgctctttaagagttcgaaataaaaatccatttcacttttatctttgcacatttaatttttctacttccttgcctaaacatgtaagctcagttgataaaactgctgccttccaagttattgcaggtgacaatactaatgagtgttttgccattgcataataatggaataattatgtccttttagaccctggtcacagtttctttgcaaattgcttcctgtatctatatgccttgtattttatgtttcattgttggtttcgttgtgttataggaacccccctactttttggtaccaatttctgtatttgtcaggataggctagatatactgtgacaagaaattaaaaatagtttaatgccttataacaataaataattatttctcattcatgcaacatgttcattatatgttagttaaaactcccttatgttttctggaagccaaactatagaacagcttctatctggaacattgatagttgcagcataaagaacaaaacatagccaatgtgaacttagtttaaaacttccactaaaagttatatgtgtcacttccactcacatttcattgaccaaagcaagttttgtagtcaagccagttattaatggagagaggaaatataacccatctcaggggaagggtatctaatatatgggaacaatcttcaatctatcaaactaataaaccaggcttagtactatagccatttattcataagagggcaaatcttatggttggaatctttaaaattttaaactttttaaaaacttatactttaagttttgggatacatgtgcagaatgcacaggtttgttacgtagatatacatgtgccatggtggtttgctggactcatcaacctgtcatctacattaggtattcctcctaatgctatcactcccctagccccctatcccccaacaggccccagtgtgtgatgttcccctccctgtgtccatgtgttctcattgttcaactcccacttatgagtgagaacatgcagtgtttgcttttctattcctgtgttagtttgctgagaatgatggtttccagcttcatccatgtccctgcaaaggacatgaactcgtcatccttttttatggctgcatagtattcaattatgtatatgtgccacattttctttatccagtctatcattgatgggcatttgggttggttccgagtctttgctattgtgaaaagtgctgcaataaacatacgtgtgcatgtgtatttatggtaaaatcatttataatcctttgggtatatacccagtaatgggattgctgggtcaaatggtatttctggttctaggtccttgaggactcaccatactgtcttccactatggttgaactaatttacactcccaccaacaatgtaaaagtgttcctatttctccacatcctctccagaatctgttgtttcctgactttttaatgatcaccattctaaatggcaagagatggtatctcattgaggttttgatttgcatttctctagtggccagtgatgatgagctttttttcatgtttgttggccacataaatgtcttcttttgagaagtgtctgttcatatctttcacccactttttgatggggttgtttttttcttgtaaatttgtttaagttccttgtagattctggatattagccctttgtcagatggataggttacaaaaatgttctcccattttgtaggttgcctgttcactctgatgaatagtttcttttgtgtgcagaagctctttaattagataccatttgtcaattttggcttttgttgccattgcttttggtattttactcacaacgtctttgcccatacctgtgtcctgaatggtattgcctaggttttcttctagggtttttatgacttcaggtcttacatttagagtctttaatccatcttgagttaatttttgtataaggtgtaaggaaggggtccagttttcccaacacaatttattaaatggggaatcctttccccattgcatgtttttgtcaggtttgtcaaagatcagatggttgtacatgtgttgtacattatttctgaggcctatgttctgttccattggttaatatatatgttttggtaccagtacctgctgttttgggtactgtagacttgtagtatagcttgaagtcaggtagtgtgatgcctccagctttgttctttttggttaggattgtcttggctatatgggccctttgttggtttcatatgaaatttaaagtagttttttctaattctgtgaagaaagtcaatggtagcttgatggggagagcattgaatctataaattaccttgggcagtatggccattttcaagatattgattcttcctatccatgagcatgggatgtttttctatttgtgtcctctcttatttccttgagccgtggtttgtagttctccttgaagaggtccttcacatcccttgtaagttgtattcctaggtattttattctctttgtagcaattgtgaataggagttcactcatgatttggctctctgtttgtctattaatggtgtatagtaatgcttgtgatttttgcacattgcttctgtatcctgagactttgctaaagttgcttatcagcttaaggagtttttgggctgagtcgatggggttttctaaatatacaatcatgtcatctgcaaacagagacaatttgacttcctcttctcctatttgaatatcctttatttctttctcttgccttattgccctggccagaacttccaatactacgttgaataagagtggtgagagagggcattcttatcttgtgctggttttcaaagggaatgcttccagctattgcccattcagtatgatattggctgtgggtttgtcataaatagctcttattattttgagatacgttccatcaatacctagcttattgtgattttttagcatgaaggggtgtttaattttatcaaggccttttctacatctattgagataatcatgtggtttttgccattggttctgtttctgtgatggattacgtttattgatttgtgtatgttgaaccagccttgcataccagggatgaagctgacttgatcattctggataagctttttgatgtgctgctggattcagtttgccagtttttttattgaggattttcccatcgatgttcatcagggatattggcctgaaattttctttttttgttgtgtctctgccagattttggtatcaggatgatgctggcctcataaaatgagttagggaggagtccctctttttatattgtttggaatattttcagaagaaatggtagcagcaactctttgtacctctggtaaaatttggctgtgagtctgtctggtcctgggcttttttttttggttggtaggctattaattattgcctcaatttcagaacttgttattgttctattcagaaattcgagttcttcctggttcagtcttgggagagtgtatgtgtccaggaatttgtccatttcttctagattttctagtttatttgcgtagaggtgtttattctattctctgatagtagtttgtatttctgtaggatcagtgatgatatcccctttctcatattttattgtgtctatttgattcttctctcttttcttctttattagtctggctagcagtctatctatttggttaatcttttcaaaaaagcacctcctgaattcactgattttttttttaaggatttttcatgtcgctatctccttcagttctgctctgatcttagttatttcttgtcttcagctagcctttgaatttttttgctcttgcttctctagttcttttaattgtgatgttacggtattgattttatatctttctcactttcccatgtgcataattagtgctataaacttccctttaaacactgctttagctgtgtcccagagattctggcacattttgcctttgttctcattggtttcaaagaacttatttatttctgccttaatttagttatatacccagtagtcattcaggagcaggttgttcagtttccatgtagttgtgcggttttgagtgagttttttaatcctgagttctaatttgactacgctgtcgtctgcgagactgttttgatttctgtacttttgcatttgctgaggactattttacttccaattatgtggtcaattttagaataagtgcgatgtggtgctgagaagaatgtatattctgttgatttggggtggagagttctgtggatgtctgttaggttcacttggtccagagctgagttcaagtcctgaatatccttgttaattttctgtcttgttgatctgtctaatattgacagtggggtgttaaatctcccactattattatgtgggagtctaagtctctttgcaggtctctaaaaacttgctttatgaatctcggtgctcctgtattgggtgcatatttaggatagttagctattcttgttgcattgatccctttaccattaagtaatgcccttctttgtctttttttatctgttttggtttaaagtctgttttatcagagactaggattgcaactcctgctcttttattgctttccatttgcttggtaaatattcttccatctctttattttgaacttatgtgtgtctttgcacgtgagatgggtctgctgaatacatcacactgatgggtcttgactctttatccaatttgccagtctgtgtcttttaattggaacatttttgttcccttgctggagaggagctgtgatcgtttggaggagaagaggcctttttgcaattttttccctcatcttcatggatttatctacctttggtctttgatgctggtgaccttcggatgtggttttggtgtggatgttcgttttgttgatgttgatgctattactttctgtttgttagttttccttctaacagtcaggcccctctgctgcaggtctgctggagtttgctgcaagtccactccagaccctgtttgcctgggtattaccagcagaggctgcagaacagcaaagattgctgtctattccttcctctggaagcttcatcccagagggtacccaccagatgcccgctggagctctcctctatggctgtcgacccctgctgggaggtgtctcccagtcaggaggcatgggggtccgggacccacttgaggaggcagtctgtcccttagcagagctccagtgctgtgctgggagacccactgctctcttcagagctggcaggcaggaaagtttaagtctgctgaagctggacccacaagctccccttccctgaggtgctctgtcccagggagatgggagttttatctatcagcacctgactggggctgctgcctttcttttattttattttattttattttattttattttattattgttatactttaagttttagggtacatgtgcacaacgtgcaggtttgttacatatgtatacatgtgccatgttggtgtgctgcacccattaactcatcatttagcattaggtatatctcctaatgctatccctcccgccctccacccaccccacagcagtccccagtgtgggatgttccccttcctgtgtccatgtgttctcattgttcaattcccacctatgagtgagaacatgtggtgtttgttttttctacttgcgatagtttgctgagaatgatggtttctagattcatccatgtccctacaaaggacatgaactcatcattttttatggctgcatagtattccatggtgtatatgtgccacattttcttaatccagtctctcgttgttggacatttaggttggttccaagtctttgctattgtgaatgtcccgctataaacgtacgtgtgcatgtgtccttatagcagcatgatttatagtcctttgggtatatacccagtgatgggatggctgggtcaaatggcgtttccagttctagatccctgaggaatcgccacagtggttgaactagtttacagtcccaccaacagtgtaaaagtgttcctatttctccacatcctctccagcacctgttgtttcctgactttttaatgattgccattctaactggtgtgaaatgatatctcattgtggttttgatttgcatttctttgatggccggtgatgatgagcattttttcatgtgttttttggctgcataaatgtcttcttttgagaagtgtctgttcatatccttcgcccactttttgatggggttgtttgtttttttacttgtaaatttgtttgagttcattgtagattctggatattagccctttgtcagatgagtaggttgcaaaaattttctcccattctgtaggttgcctgttcactctgatggtagtttcttttgctgtgctgaagctctttagtttaattagatcccatttgtcaattttgtcttttgttgccattgcttttggtgttttagacatgaagtccttgcccatgcccatgtcctgaatggtattgcctaggttttcttctagggtttttatggttttaggtctaatatttaagtctttaatccatcttgaattaatttttgtataaagtgtaaggaagggatccagtttcagctttctacatatggctagcctgttttcccagcaccatttgttaaatagggaatcctttccccattgcttgtttttctcaggtttgtcaaagatcagatagttgtagatatgtggcattatttctgagggctctgttctgttccattggtctatatctctgttttggtaccagtaccatgctgttttgtttactgtagccttgtagtatagtttgaaatcaggtagcatgatgcctctggctttgttcttttggcttaggattgacttggcgatgttctttcagagattccctgcccagagggaggaatctagagaggcagtctggctacagcggctttgcggagctgcggtgggctccacccagttggaaattcccagcagctttgtttacactgggaggggaaaaccacctactgaagccccagtaatggtgacacccctccacccaccaaggtctagcatccctggtcaacttcagactgctgtgctggcagtgagaatttcaagccagtggatcttagcttgctgagctctgtgcgggtggcatcccctgagctagaccaattggctccctggcttcagccccctttccaggggagtgaacagttctctctcactgacatttcaggctccactggggaaaaaaaataaaaaattaaaaaaaataaataaaatttaaaaaactcctgcagctagctcagtgtctgcccaaacagccacccagttttgtgcttgaatcccagggccctggtggtatgggcatctgagggaatctcctcatctgtgggttgcaaagacagcaggaaaagtgtagtacctgggcgggagtgcaccatccctcagggtaccatccctcacagcttcccttggctaggggagggagttccctgaccctttgcgcttcccaggtaaggcaatgccccaccctgcttcaactcaccccccgtgggctgcaccccctgtctaaccagccccagtgagatgagccaggtacctcagttggaaatgcagaaaccacctgccttctgtgttgatcttgctgggagctgcagacctgcactgttcccattcggccatcttgctagccacctagaattttaaacttaattaaaattttaactgtcaaaattactgcgttaaaatgccttgagaaatttttaccaaagatgaagagaaatttcctccttctctatcaagactccagtaaattaattataggtactttatattaaggcagtgaatgaaatattccgagctccaagacagagtgacatttgttggaagagcttgtcaacaaaatatctttattttctaatcaaagtaagattaagcaataatcaggcattactgtcctgagtttcatgtttccactagtgaagtcttcttctctgtttaaaggttttgagtaggactggagcttattttcatcataagagggacaaaaagaaaggagtttatacatagtccacccaatataatgaacttctttctacagagggataccagcttccagatctatcctgagataagtgacacggatgagcagttgtagaatttcctttcttgcatgggtgtgagaaaccaatatcatcttttctaacaagagattgttcttgcaaaagaacaagcatgtacaagttattatgatatagtacaaagattgttgaacacctcaagtccatatttcatccatttgaaatggatttatttacaccttaccctaggaataaaatggcctcagcctggctgtaccatgctctcttagtgacagttttccaagtctacatgtgcagaggttaaggaaacattgttatgtagcaaacggctaggaatcccacattctctgatccaacattcttcacaaaattgtccaggggtccttggaacactattattaggcattatacttttcaaatccttaaattaatctgtgaagatttctgtcacattttaatttatatctttttatatatcactgaagctgaatattttctcagcttttataattttatcttctgtgagtttctttgcttatgtcttttgtcagagtgccttttcttgaaattaaaattgattttattttaaatttcttattataaaacatccacttccttatatttaaacccttaagtcatatagaaaattagttttggcctttgagtttttaaaaccatgtccttagcgccaggtttggtttgtaagtaagcacacatttagttattagaacataagtgttggactctaaaatgaagtgaataagtcagagaagtggtcataagcctattggaattgacttaattgaaaacaaaaatagaaacaaaagttagattgtgtttgaggacatgcttataaatcacagtttttcacaatagcaacgatgtggaatcaacctaaatgcccattaaagatagattgcataaagaaaatgtggtacatatacaccatggaatactatgcagccataaaaaagaatgaggttatggcctttgcagggacacggatggagctggaggccattatccttggcgaactgacacaggaatagaaaaccaaataccacatgttctcactcataagtgggagctaaatgatgagaacacatggacacatcgagggaaacaacacacactgggaacttttgaggggcagagggtgaaaggagggagaggatcagggaaaataactaatgggcactaggcttaatacctggctggtgaaataatctgtacaataaacccccagaacacaagtttacttatgtaagaaacctgcacttgtactcctgaacttaaaagttaaaaaaaaataaaagtgatatgaataaataatagtaaaattaataagtagaaagtaaatcaaaatataaatatactgtgcagcaatctcactgttgcatggcatagcccacattagctaacaacattgtaaaaaactttactgaagactatttatttaaccaaaagtttatatttatatgcctggatgtgttttatgcattaatacatagctgttttccaaaatatacttaaggcaatatacaaaaatcctgacaatatgactaggggttgttgagtgaacagaaaataagaataccaggaagttagctgtggtataatataaggttcccaatatgtgccttgattttctttaaataaacttttaattttagaaaagttttaaagatttacaggaaaattgtgaaaatagaatagagtttctatatactccacaatcagtttccctgactgtaatatgtaacattagtatgttagatttatcacaatcagtgaaccagttttgatacgttattaactaaagtccatctgctattcatagtttcttaatttttatctaatgcctttttttctgtcccaggatgccatccaaaggataccactttgcatttagtcatcatatcaccataggtctcttggctgtgattcttatgactttttaaaatatggaaagtttgtataataagggttacgtaaaatcagataaattcaaggttgtgtttagagacaaaataggtgttatgaaattatgttctgtctctagaggtgggcaacaaatatgaccctgaacccccaatgtccaaaagaaacaaatacaccagttgtttacagtgcttcacagaaatgaaactcttcctgatagtgagtcctgagataacctcctcatacagccttcaataagagaccactttgtagtgtcctaagcattttccgtaacatacttttatgtaaagtaaaaaatggcttacaaaggctattttctatagcatctttgaggttagccaaggtcgtaatgactaagtgtatttcaggtgtggggaggaaggatcaaagtggagtcaaggcctgaagctatgcaagttcctcagaggtctgggaaacttcccttaaataataggtagctgatcctacagggctcttctccaggcttccggaaaagactgtccaactcagtcatcgccatgtctatttcacaatacacccactgagtccacctcaccccccactttccctagtttcttctttgatgcaatacaagcaaatgacttttaaacctagctatttgaagagagatttcgatgggcgatttagggtcagtggacataaggtcaggtagttgttgaggctggtgggactataagggactggatttccacaggcaaggatgtgaggcgccccacagattgtaggatagctgcctgctctgttttttcctacatcacaatttatttggtcaggggcagctgctcataaaaatgaaacatattttctttagccacatctgtctatagtgcacggttgccaaaagtttgaagctaccttttctatgcatttctaatatgccagaaaccagatgggattttctgtaattgcaatcatttatattgttctctagatttagaattcctatgtgaacaggattgtcaattaaaccatctctgcaattaaaataaaagtgatacccactacgcctaagcccatacacacacacacatatacacactgacaaaagacatacacataaagacacactgacacaacaactgttgtcactgacctaggtctgtaccctaggattagtagactcttatttgatttctggctttactccttggtatgtgtggctttggaaaaagcaaattaacatctctgggcctcagttgcctcatatgtaagcaatgtgccaatgttaaataacaaagtgaaataaattatgtgatcctcctaaaaacattaaatagtaatattatcttaactatactctttacctctttatatacacatatgtaatgtacatatattcaacactattttacttatctaatcatgacatatgatctctatcttctatatcacaattagaaccatgtgccctttcctgtgtgatatttgtcataaggttcccctcgtatttctttctgttcttttgaattcttcacctttccagttgtcagatctatgcataggctctcaagatactcatctcaggggaaatttttattgattaggtgcagttgggaatttgtctctatcttcatttgatccttacctaaggagaaaagaccccatgaccctgcagaggacagacactactgtgggcatgttatccttcatcctcaatagggcaggctatgccagtggcgtggggcagcctgacctgtccatctgtaagtaaatgccactagtgtgaacccttctaaccccaccttaccacaccctgggaccatctgttaccatctgttaccagcacatctttgatctcctcctgaggagtctctgtttttcttgctgccattgtcaaacttttctcttagatcatagattccttaaagattgtgaatgtaggatacatttttctattgcctccccagcaagcacaatgaaaaggtgagtgtgtgatacacagagttgaacgaatggaaaagagatgacattgagcatccctcagaagttccctggcatagatctctcactgcctcaaagctcctattacctattataattcaagtactatttcagatggggcaccctaccagctttaatgctgctgcaaattccacagtggaggacagggatctgaaggacaagctcatgtgttttgtggaggattaaggtcatgagcagttaggatcttgagacccctggctttcttgactaaggcagggtgttgcgagagattggatatcatgaaagcaatgacaagagtttgggttccttagagggagtggccaaagatgtatagatagaaaggcaccaaaatcaaaccttgttacatttctaaacataactttgtgtgatttcctgcaaatcacagatgctccttgacttatgatggtattacatcctgataagcccattgtaagttgaaagtactataaatcaaaaatgtgttgaatacacctaacctgccaaacatcatagcttcatagcttagcctagcctgccttaaatatgctcagaaattttacattagcccacagctggccaaaatcacctaacacaaagcctatttgagaataaagtgctgaatatttcatgtaatttattgaatactgtactgaaagtgagaaacagaatggttatgtgtactcgaagtccagtttcttctgaatgtgtatatcttaagtcaaactgttgtatgtcggggactgcctgtatttcttaaacttcccaagagttcttactgacaggcctaacatgccagtgttgattaagtaggctttttgctagtttcagaggaaaataaatgtgtaaaactataagtaagaacccagttgaccaaattgagcagtagcaagtttcttgaatggcagaaaaggtgactgtgtgattatgactgaacaactcaaagaaccctggacctccctttaattccgctggctgggagggaaacatagtgaagattcatgctgcattggttttcttttttcttgttaaatggatttttgttggttgtcttagatacaattatttgatttagcttggaaagttactcaggatctaaagagaaaagtttccggagagaattggtgtatttttaatgagtttttactagggaaacaatgtaaaattataatggaaacctactgggaattttcccacactcccatcactttatcaaatttgccatcacatgtctttttatattatagacttttatcctatacataacaaactcctacatgttatagagatatttttgatccagtcttgtaatctaaattttcaattttatattggatttaaaaaaaatctttttctcttcccattgtatctgtagcccttcccttatcttctcttaattctggcaagtctaaaaaatacatcatcagcgtggtgttatccccaatctattggttacttttgtttataatgttgctttgttttaaattctttaatgttttgaggaaaactaacagggcttaatacatatattctgcaataaaggcaggatcaatcaactacttaagtaaatctagcagttgttcattatatactattacatcataattaacttgtgagtgtgtaagaacatgctatgggctgaaaaaaattatttatatctgtgcccacagaagtttatagtcaagttgaggtgttggggcatactcacatgattctataactaacaggaactaatcatatataacagcaagctaagctgaaataatagcatgccaaattgtgagatgcagagactgataggacaaggaagcacatactatacacgatgtgctaattgtgaagttcagatccatgcagaaagagagagagtgcaagagtgccctgcagccttcttgtatcatcagggaaggagtctcagaagagcggctgataggggctgctgccctggcagcattcagagaggagcaggaatggatttccagtcactattggaaatgatctatgagctatactgggctgtttggtggaatgtgcttgtctcatgccctcttagagctatagctcaccacggccatggctctgagagtttgtgccagccctgagagaacacattagggaagaaagaataaatctctgtagaacaagacattcttgtgtttttacatttttactagctagagaaaaaatggatagtaaacaagaaataatggaaaatgatattgtacaaaccaaagaagagagaccatttcactatatatatatcacagagaatgtgaagggtgtgtgcatgtatagatttaaaatcctgataataaatttataaacctgtcataagcaagggatatcatttgttgctatcaggaagactagagactcctgttaggaaacaaacagagttaatttccatctctagcatgctgcttactaggtatgggtctgggagcaaggtcaatttcatcctctgtggaatgagagcttttgtgtcttcttcataagatttgaagggagacagagtacaaacagatgctagtttgtcctgttttcctttaaaaaaaaattctaatcccaaacatgtttatttttgaaggtgactttgagcttgtgttaagtagcactaaaaagtctagtctagccatcagttgcccttgaagaacggccttaaggtcaactcattggttgaaaaaaattggccttcggagtgaaactatcatgtgatagtttgggaatccgaaagaatcacaggactagtatggagacagtacactctccagttatcatttgagggatatgagcactctttatttcttaaacactcagaggaagtactcttagaccattacagtattgatcataatggtagatttcatgaaatgtgaaaacccattgtctttttcatggagtatctttttatagttggctgggagctaatgcattgtgtgtatctgccaatgagagttgttttagttttctctgcagccttaacaaattatcatgatgttagcagtttaaaataacacccatttgttatataacagttatgtaggtcagaagtctcagtagagcatggctccattgagtcttgtttagcatctcataaggctctggggatgaatcaatcctaagcctgtttaagttgttgcatgaattctcttcctggagctgttgtcctgaggtccccatttctttgctgcctattagccagcagttgttcctagaggttgttcctgtaggttgtctacatcccttttcgtgctttccacatgacctctctggcaacaatggacgcagtccctcctgtgcttccaatccttacatttgtgccctgtttctctaatcccaggcagagaaagttctcactttaatggcccatatggtttggaatttgcccacttgaataatctagaataaccccattattttaaggcatttaatcttaattacatatgtaaagtacctttgccatgaagtgtaactttcacaggtttcggaaattagggtgtggacatctgtagggggccattctgccccctgttaaaagctattactctgctatcagttttttaaggtattttgtcctcctcaaaatcactttttaaatttcaattccatgagcttggcgaccctgccatctaatatacccaaaatataactctcagagggttagttcctgatattccggtgacactgctttgcctcaaatatacacttattcgttatcatggattgcctcttaacatgagtactgagtattttcccccatccctgttacatttcttagttgtaggatctattttctagattatcaaattaaaagaaagtggtttttattgataactatgcttcattacacttgaatacttgtctgtgaatattatatgggacaatgatcaggaaagtagttaaaaatatatttgaccacatttcctggtagtgatgtgggaaaatgtagatgctgaaccatctgttgtcatttggtaggattcagctggcatgaggctcaggctggctgataagagaccattactgacatgggtactctgagacccttcctcatatgggtgcaaacaatggctcctgggatgtgggtgaactcctaaaggaccaagagacaaaagcctacatcctcaggtgttgattctttttttttccccctagtatttacttcctttaagtgtaggaagataaattgaggaaaatcacacattattactgtaagattgtaaaatccttgttcttcaggctgtttttctcttcttcattcctttggcttacttgtccttcagccatttcactgctaatataatttctaccagcaagtgaacggtggcagagaaatgacagttatatcttactctaattatcagcctgatatacggtttggagaatgagatggtgaaaaccaggggccagaagagtgggctctttagtcatcattacttgtctccaggatcccagtaacaatccaagtagcctatagatggcctttactataaagacctgggcatacttagaatccaagtgggcactgttggagcttacctagataatcctttccttattttacaagatgaaaaacctggacctagaaaggtttatgagctgtcacagcccagagaagcctaaagaaacaaggaaaataaatgaacagtgatatcctggatagaattctgggacagaaaaaggaaaaaaaaatgatgaaatctgaaaaaaataaaatggagtttagtaaataatagggaaaataaaggaagtcctaccctgggacctgcccattgaaaggatgcccactctgggtaccctcaagttgctagtgtctgcatgactcttccagcacttcctgtttccattgtcctaacctgggttctccttttcttgctgaacttatttgcctgtgcctgtccctgttcctagtttcaggaagggcttccacactgcagaactccaagggcaccattatcatcatgttctttgtcaatgacatccactggagatgtgcagtccaggcagtactccttgggtaaaagtttctgcctctggactagatgtctgtagcagaacctggcagcctactgcctagacccatcctcttccagtctctctcatgtcccaggttctgcctggagaaaaactatatgacatcaggaatgcttttacttctctgtgcctatttccttctaatacttttcctctgttaattaaaaaaattcaaaaatcataagaggccatcaaatgcttctacacatttggccaactaataatggtcttctgcatgggcacagaacacaaacaccatgtacatttcctcatacgatatttagaaaattgcccctgtgatcctcattcatatgtatggttctccattctgtcctcagaatttgttactgaaagttgcattggtcagtatgaataaactaagaccagaatgcaaatccactgtattttctccgtacgggcttcccaccagcttatgtctggccaggttttgaacagttgcagagaaagtgtgcttactgtaacagagtggctaggtggggaggaaagcacctgatggatcatcatttgcatcttcatatgccctttgtgctccaggatgccttatttcccactaataaatcaccataagcttgaggcctttgtcttgacaacatcattttctctcagtccaagagcatttcatggtcttggtgatatatgatgagacttcgtactcatgtggattcctgtgtaaagaatttctctttattggattttttccctttgaaatttagccaaaatttaatgagaaaaaattatccattatgggggttttgcttttaaagcaaatatgactgtccagttgcaggtgtcttataggtgctatctgctttcagttaagagcaatttagatatcagattagaaacccttcccgttgactgacatcttacaaatgaaatctgcagcctcttgaacttaattatatcttcatgaatattgtaaggcttcaaaacttggctgtggttttgaaactcagccagggaggtattaatggtgttataatttgtatttatgtaatgttctttcttccagctggttcaaagtacctaacgcattgtttcagtctctctacatagactgaaaacctcactgtacccatttataaatagggaccctaagggtcaacgaagtgacacaaattagtaaagtccacataaaactctaggaggtttctttgtgctctgaatgcctccctaggaaagttgtgttcactgttgagatgtgttttatttatatcacattgtgctaaatacacattcagtctcaacttctgcttcagccatcaatcccagctcctgttccccttttctctttctttgcccacccacttgatttccatcaataacttcttcctactccaagtcctagaacatcatttttaatctttaaagttcaagacactttcccagggcccccaaaatggtaatttttttaatgtgtaggtctatgatgagcccggaaatctccattttaacagatacattaaaagagtacaatgcttataattttttaaatacctcatgacatggtttggctgtgtccccacccaaatttcatcctgaattgtagctcccataatccccacgtgtccaggaagagacctggtgggaggtaattgaatcatgggggcagatttttcccatattgttctggtgatagtgaacaagcctcaagagatctgatggttttacagagggcagttcccctgcacatgatctcctgcctgtgtccatgtaagatgtgcctttgctcctccttcaccttctgccttgattgtaaggcctcctcagccatgtggaactgtaaatccattaaacctctttttctttataaattacccagtcttgggtatgtctctataggagcttaagaatggactaatacacctcacaatcagtttggatgtggagtgggagagttggaaagagtgttagtatcttgagcctgagcattatggtgtagtagaatctaggccatccattctttcttaaattgagttctcaagaagcagagccagaggcagagattcctttgctaatgatttgttgaggcgtgctgtcaagaggagaggaagtaagctaagactggggagtaagttaagtaatgtctcagctggagagaagctgcaatctgattccaggaaatcctctgaaacacagattgactgagagttagcaaggggtccaggcttttgaactccactatccatcattggttgagttctggcatacagcaaacgatgggggaacagagtcttcctgatgaggcatttcctgttcgcctgagagcaattcctcacagaagatggcagctgtgggttgattttagcaacactccatcagctgtgctgtgagtgttctagttgaaaaggtggtctaggctggtcaccaaaagtattggctacatctctccactcaacaagagttacctttgctcctcgccttgacctcctggcttttccctttctccagtattggcaactcttctgatttgatgccaagacacagtcccatcttgaacccagttccagtacccgactctgtatatttttgtgcctgagtccctgtcttggtagcttctatgataccacaactaattaaaaacttgttctgaataatgcttttcctaaagagtgatgtcctgccctggggcctgccattgaaaggttgcccactctgggtaccctcaggtgtttgtgtctgcatgactcttcctttacttcctgtttccaaggtcccaacctggtttttcgctttcttgctgaacttatttgcctgtccctcttcctggtttcaggaagggcttccacaccacagaactccaagggcaccattatcatcatgttttctgtggatggtgatggtgacctctggagatgtggagatgtgcggtacagcagtccaggcagtactccttgggcaagtgtctgcctcaggactacacttctgaagcagaacctggcagcccactgcccagacccagcctctcccagtctctctcatgtcccaggttctgcctggtgataatccatataaattcaggaatgcttttacttctctgtgcctgtttctttgtaatacttttccacttttaattttttaaaaaattggaaaatcacaagaggctatcaaatgcttttacatatttggccaactaataatgaaattaaatgtttcaatcaaatcacttgggggatatattcctaaaacgttctttggacagagtaaacaaaggaactaaactatatatggaaagtaagggatagggatattaagccagcttcctagtctctgggattgctgcctgcacacgacttggccttctcatgaaattcagggtctgtgtgctgtggcagaaattcaaaaagcgctgcttccagcttcttccctgccaggaaatctctcttctaaagatacagcacaatgatgtacttggtgaatcagactcaaattttgtgtttatttacaggaaattaacaaaagtgaaaaaattataacgacttgaaaatactataataaatgttatcattataattttaaaataatgaggccacaaacaggaatacacaattcccccaaaagaaaatgatttacttcccctagtaactaaagaaaacaaaaagaataattttgcacttgtcaaactggcatatattatacaaaatgatagtatctactgctggtcaggatgtggtaaaatgggtgctcagatatgcagctgatggtaaaatacatgctatgatttttcctggggggaaattttccaatatggatcaagagtctaaagaaacgtcttaatcgaacaattttactgcaaatgattcataccaaggaaatgatcacgttatgcaatgctagaaatatttgtgtgcaaacaggaaaaataaaaacttcctatattcctaatctccaacaggtcaaatattagataaatgctaatatatttttaccacgaattataatggctccattttactgggctatggcaggtatgctatgaatcggctttttcaatggtgatataatccaggctcaaaggttcctaagactggcatggaaaagacagagcagggttgaagttacttgcatctaacaagctcagccccaacaagtcctctatgtggtctatcttatcccgtttgaattctgaatttggtttggggcccaagccccagctaaaaagagagtgttaactttgctttctttgcctccacagttcacacatccttctcagggcctcttgcatgtctatggcttagagtaggactcatgagcttatgtatgtttaaaatagtcactgtggactgaacaccatctagcagataaggccttcaaagaaatgatagtccactgagcctgtctatgctaaacgtctataggagctccctttgacttattgcttcaaatctaaagccctctgatttgttaaagttcaataaatatctgttattattccctggcttcctgcagtggaatgttatgggggtacaagttatagaagcccagagtagctctttattaaccaagttcataaaggcttggatctgccctgccccctccacactcggtatctcctctctgtttgcaccactatcaataccaatgctacttagcagccccttcctccttcttctcttctctactctgtgtcttattcttgcttaatagccatcttatgcccagcctcctccataaatcttccctgggatgccacagtgactgcagcatttcttaaatccttgtccttatagttggacccacaaagtttgactgtattctatacaaacagcacagagttagacatatgaaacatactccatgaacagctaagtaggcaattttccaaatggaaatgcaatcactgtggtattaaattcttgttctcttgaataacttcaaagaatgaactggcattctcattttaattttattctagaagcaagtaaaaattcctattatatcaggtgctgacattttcatcccatcaaataactgaatggacatgagcattcaacaattcccttccacccaaactcaattcacaaccttaacatggaacataatttttgctctatgtttaagggacttgaagaacatctcatagtttcagactaaaataataatctgaacttttccctttcattttttccatttatacacactcattttatttccacagacattaagagctctgaatttgactaatatactaaatagacacctcatttatattacagcttttattcaataatcttgagtgatagcttatagtcatcatatcaggttttcttttgaatattcttaaatgtattgtagtcaccatcaataataatcatgcttcagttagatcatcatcctattgctgagttatcagtcattcactataagaataattgagataatatgaaagacaattgtctaaataacttattactgcatgaaaataagcaaagtgcgctgatatcacagagtctactctgacaatacaaagaaggttttgcaaattggtggcaggaataggggaagtgctgtgctggatttctggcagcacgctagccctcagctatcctttcccttaacatcataagctacgttgggcttctgtaacttgtaccaccataacattccactgtgggaagccagggaccatggaaacccattaaactgcaacatcccttggcacacaaaataggcttttcctccttaatgaacacagtttgaaaacaatccaccaaggaattttgtatgctgtttcagtttacattagcagttgcagacgtacctggtgactatgactcagcagtcgttgaggcataaggaaatcatttctgccttcactttagattctgtgagctttcagggggcactactgaaaaatcaatgccaggtatgtacttagagaagcttctgttaatggttttcctgttgacctagcccatagaagaatctgtcatatttaattagtgtggcagtatcatgctgatcaatcttttccctggtttttctttcttaactatttctgagcatatacagaattaatacacctatcttggtactagtgcccatttttcagcaaactagtctctgcaatgactttcttgtcccttgttgaagggtaatctctgctgctgcatttttgtttttgtttctagctgtgtaagaaattagtgcaagggccataccaccctgaatgctcccgatctcgtctgatctcagaagctagacagagtcaggcatggttagtacttggatgagagaaatcagagcatgggaccaaagccatatttcttttttttgttttttgttttttttgagacaaagtctcactctgttgcccaagctggagtgcagtggtatgatatcagctcactgcaacctccacctcccgggttcaagcgattctcctgcctcagcctcccaagcagctgggactacaggcatgcaccactacacccagctaatttttgtatatttattagagacagggtttcagtatgttggccaggctggtcttgaactcctgacctcgtgatctgcctgcctcagcctcccaaagtgctgggattgcaggcgtgagccaccgcgccctgccccaaagccacatttctaacctcactcgtagcttagcatgtcctcttattgagaaggttgcctctttctgtgttcagttcagttggaggatgctacaaaacaacaggccccaaaatagtagggtcctctgaatgcacacattctagtatttaacccaaagcatgtgcaaacccacatgcatgcacacacatggtgagagagttctgctgtactaccactgcattttgtacccagaaccaggactgccctcaactaacacaggctttggtgtaaatctagtacctcagtctagattcttcctttatgttgagttaaaggtatccattgctcattccttcaatctagccttggttaggtatgactaactatggtctatttttcctgttttcttggttttggttagaaaaaccaagtggttagcagtatgttaagatttctgtctccctccctctctctagaattggctccttgtttatgcagttttgagaatcaaatacatacagcgaagcggtagagggaccactcctatttcatctaaattccaagctctagttgaagatgtttttcttgtaatattataaaataatatacttttggcataaaaatgaacatggaataagtgtagacaaataagcacctgaccacgtttgtgtttgtctcatatattctcatctcaaaataactagaaaccatcagggagaatcttgatatgttgcccaattagtattttggtaggactgaatcccacgatgaagacatcatccgaaaagggaataacacatgactctctagaaagcaaagttccccaaagcactaagaaagttccacagtcaacagaaacattggcccagagatgctaaactccgtatgttcctcaatcacatttctgatgagtgtgttttggtaagcttgtgcaaggtcactttgcaaagacctaaccccaacggtgcagccagtcttaacgagaagccttataggcatgggcgctgcttctctgagacaattccttgtggcaccttagagcttctttaaagtttgttatcattatttgggctctaaactaatattaacaaccatgactgtatgcctgcctcaagggccactcatttaattagagtcttaagttaaccttttttgtgtatttacccctagaagagaaggtgcacttgaaactttttaagtgcatgaacaatgactatgtcagaagaaatgaccatgtaacagtctgggaactcagacaaaaccttagggaatcagttaatagtttattgtggcggtgttggtctgagggttttagaatctataatactgacttttagtggtgagcttctttccaaattagttttgcctgttgatttttaacctcctctatgcagtgatgaacaaagcatctatataaagagctatgcaaaaatttggtctctgtattaacatcattcatgtgaaataaatcatggcaacattacatgtgataaaatgtggaaggtctctttatagattatatattgtctgcaatcagggacaaattttattttgtacacacaaacatttgttaatattgtgacaaatatcacatcttcccattagcttgctgagtgtaatgttactctgggacagtaactaagcaagagacagaagtatcttgtacttaagagtaagagttgcagagtcaggcaggctgggtgttaatctagtgacctccacatccacatccagctgtgtgatcttggacaagttatttgacccactagtctttagattgttcatcaataagttgaggttagtcctatcaaccgtttcataagtccttgtgagatgaatagaacagcacatgtaaagcacctaatggagctcctatcacagagcaaacctttaatcacattatcatttatttcctgacactaggtcagatgttagactagttcttggacatattttaaaactaaagtttgcattttagaatactgttaaagaaaagttgcaaagatagcacagagttcttgtatatcccacatctagctttctctattattaatgtcttatattgctacgtaacatttgtcatagttaatgaaccaacattaatgcattattattaactaaactctattttttttcagatttcatcttttttttttcctttttctgtcccagaattctatccaggatatcacatttcatttattttccttgtttccttaggcttccctgggctgtgacagtcctcagcctttccttgtttttgatatctttgacagtttgtagaggtactggtcaggtattttgtagaatgtccctaagtttgactttggctaacttatttctcatagttcagttgggattagggagaggaaggccaaaagaaaaagcgacattctcaaatatatatgatcaatttatcagtgatgatgttaacattgatcactcagctaaggtcgtgtttaccagacttaccataaacttactttttatggctttttaaaaaaatgctatgctctttgaaagctactcactcagtgtacgacccacttaaagaatggggaattatgtttcaccttgctgagaacagagtatctacataaattatttgaaattctcctgtgtagatttgtcttttctctctcatttgttttttacttaatcatttatttatatcagcatgggtatttattttataccctggattataatccactatcatcctttttattttgttactcaattttttctgtctctgatggttggaagtctttcagttggctcttgtgtccctttgacatatctccattttttattgttgttgttgttgtttttatttattattattattattattattattgagatggagtctttctctgttgcccaggctggaatgcagtggcacaatctctgctcactgcatcctctgcctgcctcccggattcaagcgatttctggctaaaaacattgttttgtttactttctggcactaccaagtgctctaggctcatcttgtatatttccttcacctgcactacacatgattttttttccccaaaaagtcctgatcccttttattgaagaattgtattagaaaccaagatctgggcattgggtgtgcttactgctattggagtgttgttgattcggtgaaaagagctaggtatatacgtatgccagaccacatgtaaacatgtatctgtaatcatttctgtataagtttatcagtttatataccaaactaaatttaaattcatgctgatgtttccaacaaccctttccctgtaccacatggtttattctagctttctccttttgcgtatttgtaacctcccaacccaacaatgataaaatgctgacttctaccacctgctattcatttatttgttcagtcttggtatacgtgtgtgtagctatttgaaaattattaacgcataccccatgagagacaactttactatctatagtgcagtgcttatatgtcattcctgagtgtcattttaatagatttcgctcagactgtgacctctcaaggtgatccttcttattgtagaatctgtatttgtcgttcttgtttctgtaaatatgccctttacaacctgagcagagtggctgatgtatccagatagatttgcattaagtctggaccctgcatttgttttatcaacagatgttactaagacctccttgcctgtgtgctcttgataacattaatcttcctaaattctgggatagatattgactaaagtttcactagccatgagtttttattaggccctcgggaattctaaatttgactttttgaagagatgctattgggagacaccatataaaaggcaacattaaagaaatcctcacaattacgacactgagacagagtgtcattatttaactgggctgataagtctacataaagtaccaactaatagaagaaatgaactttaaacaaaaatccacagtatatctttttcgtttttcttttcttttttttctttcttttttttgagacggagtttcactcttgttgcccaggctggagtgcaatggcatgatctcggctcaccacagcctccacgtcccaggttcaagcgattctcctgcctcagcctccctagtagctgggattccaggcatgccccaatatgcctgacaaattttgtatttttagtagagacagagtttctccttgttggtcaggctggtctcaaactcttgatctcaggtgatccaccctcctcagcctcccaaagtgctgggattacaggcgtaagccaccaagcccagccaaaatccacagtatatcttattcccatgtgttgctaatactgtagtaaaccttatggcctatatttaaatcacaaagtctgttcagaacatggcaggcttctgttccttgcttccatttcatctacttggcatattaattctaggaaaacagctgaaggatactctttaatatgtcctaaaatagactttttaagtgcaacatcttgtcaagttatagatattttgttgcattcatttagagtcagtcataaaagtggatttacaatgttaatgccatataacatttatggttttgttttgtaataagcaagacctcatattggttaccagaagatgttacattagaccctaataaaacaggtcagaaataagtagagcttttacaataactcttgtatttcactctgtattttccctttgtgttattagctcagcctaaatcactgcagcatgaaaatagagatactcagaaaggacataccattgcttgggattcaaagaggaccataatagcataaactttgaagctttcttacatatctaaaggaaagcatccttcctatcacccataaataaatagaggtggtgctatgagcatagatctgccttctgccttcttagagtgtgggagaggccaagaggaataggcttggcaaggattctgacccagcaggttgttgagtaaggaattggttctgatggattcttacaacagtctaacttcccacactggctaaagcagtcagctctctgtagcatactctgtctctgtgattacctgccaaatgcctactgcagacctgcaaagattagttacttcgggggagtggtttattactccacaacactgttttgagccaggtcaataataacagcaaaggcacacagcaagcagcccttgtttcctctcttatagaaacaaagagccccacaattcaactgttactgattgatcctcggcatcactttaacacccttgtgattgcccttatttgttttccagatacaccataattttttgaaatatgaatcagctaaatgcaattgtattttcagagaatcaagatctaccataccttattgtcaatttgcaaagagcctgctgtttatgtgtcatgcacatgagaaatttctgttttaacaatagattggaatgatgcatttagaaaagtatctgtattgtttgcacatgtaaagcccaggtggggttaagcaatagaaattcaactaataataaccgtgataataacatgtgcttgattaaatgatcttttctttcttctcttctatcctacatagcagttaatttacattttaataaactgaatagaaaataatggatttgttatatttttctatgatgtcagcagagataaccctttagggaaagagtaaaatatagtgtcagaggaaacaattcccaggtcctagacttgggcacaggcaaggctagacagttctgaatcttatctcaaattctccctggaagagcataaagaaactttagcagccaggcctccaagcaaaattgagggcactttatccctttgaggtcattatttaaaaaatgacctgattaatcttccttcaataaatctaagactcaggcaatttaaaggaatctgaatttcattttctttgctcgatatgttaacaatataaaataattacagccctttctattttgatctgaattgagattgtatcaaattaggtattgaatatataattctgtcaggcaaaaataagcagtggagagctacaaatgtcgagaaatcagaagaatattttctccagggggagtcacatttaccattgcttccccgaatgcttccttgctttatgaggagatagaataacgcggtgtttgttcttttaatttgaagttaatgacaagaatttagatttgaaaaggtaccactgtacctacgtgcatagtgatggggttgcattaatgaactcaaacaggcatcaacaaatgtactttattggagctaaacattctttcaatatttttcaattctgaacattcaaactggcacaatattactaacaactcagaacaaacaaacattaagctaataatttttgctaacaaatgtcctgttgtctgtaatgggactgctccactagttgggtaggactgctgctgcgtgcatgcacagtgctgcctaatagggagtgcctgcatatgaattcctcatctgtccttgctgactctgtgaccttgaacttaggactcctgattttagtgggccagccaatgtatttcattctcaaatttagatccgaataagaagtagacctaggaatatacttgtgagtgcacatagaacattcaaaggaatttataaaaaattagaattaatatgtacatttagcaagcttgcaggatacaaagttagtatgcaaatatcaccagtattcctgtatactagcaacaaacaattaaaaaataaaaatatgccaattgtagtagtatcagaaaaatcaaacacatggattctgcacactgaaagataaaaaaaattgctgggataaattaagaaaactaaataaatgaacactttcttctagaaatgctccataccatgacctgggcagcagttacatgaatgtgtacatatgtaaaaagtttttgacctataaagatttctgcactttactatatgtgatttatacttcagtgaaaaacaaaactaactgataaacaaaagacatactggatcgggaacatggttttgatatgtgcccacaatggagagcctgcgtgctgctgcactcaggtagccgtttatagcccttgttgagctttcacaataagaacatgattactatttagaaccaaggcagctattttcataacccactgtgaagcagttaggcaggtattcttttgaaagtaaataaacacagtcaactacaattatttggttccatttagcatattacaaaaagtaatggtttaatgatatcctagtggtcccaaataaagtaccacagaaaatgatcataaaatttccttctcactaataactctgagacaagtgttatgaaaaggcactaaaccccaggaagccaaagtgttttcaccttcccaccaggtgacaatgttattagtttataattctctatttactagccatgaaaatataggagctttagaggacagggcagcctataatagattttgtttgttcaataatagatccttacaacattatctagacagttgctgtagtaaaggaaatggccctataaaagccacatgactttccaactttatgtcacatgttcctgcatgctagtttattagacttggggccagcagggctgagactgaggtagtagctgaagagagttcttcctgacagtaggaccctcctgggtgtacagagcccaggggactggcagagtaagagagcataggtactcacttcagatggacacaaacacacaaactctgtgtttattttggaaagaggtgtgagctattacattgcaaatattccccaggagcatgtatctagcctcccggctctctatatgacactgacagaatgggcttctttgtcatcatttgctgttggtagattgggtgccagtacttgtagtcagggagacagctgtgcacatctggaatgatcccagagagaagtcctaaaccaggcttgacaatggtgccagggcactgaaggatgccctgtcctctgtcaccagaaaagcttctcctctgtagatttctatacctgcccctgcattgccactaagtgtgacaggaagaacaaggagtgaggaggcatttggatccaggttataccacatgctttcctcacctgtaaaatagtgagactaatgtttagttggcaggattatagtaagcattatagctcatttattaagtattgtatataacaaacaagaagtggtagctattattattattattattattattattattattattattgagacggagtctcgttttgtagcccaggctggaatgcagtggcgcgatctcggctcactacaagctccacctcccgggttcacgccattctcctgcctcagcctccagagtagctgggactacaggcgcctgccaccatgcccggctatttttttttttttattttttttttatttttagtagatacggggtttcactgtgtttgccaggatggtctcgatctcctgacctcatgatccgtccgcctcagcctcccaaagtgctgggattacaggcgtgagccaccacgcccggccgtattagtattattgtagatatgaagctattgcctttactttaaatgctctttcccaaatatttgcctgattcactccctattcttcttcaattattcactcaatgctcctctttttagtgaggtctactctaaccaatcgacatgatactgtctcaacatacccactttttctttcctgttctcttgtatttttttctgtaacactgatttgattgtaattattacataattttcttagttgtgttaatttttagaaattttctatagccttttacaagaatttaagtccggagacatcaggtattcttgtatgttttgtctacataataccccattgaaaaaagcagtgccagatgtatcataggtatgaataaatatttgtcaaatccttaaaaaattacataactgtgaaattagttaaaaaataatgacattctactgactattgtttgtatatacatatgtatacatctatgtacatatatttacgtgtgtctatacatacatatttttatgttaatcttacccttaataacctcagaagataagacacagttagaaggcacctgacttaagagagatgacacaattttcctggtttgccttatttacacctgtgttctcaaaataattgttgctaacactaactttctctctaaaaaaacgacccaagtcataagttctatgatcaccctaaatgaggatcaaaaggaaaagactgatctcacagatatccaagaacagttcctgtctcagtgctgatgaatgaagtatccactagacaaccactggcactggcttaagaaatttgtactggggacaccaacataattttttatctatgtaaaataaatcttaaatagtagttataaaaacaagaagagcaaactcagtgtccataaggcttgtgtctaacagataatttttcatttggtaaagaacattgtgtatttattctgatatttttctacagtttgaccctgttgttggttgtaatgactgcaactttgggtgatggttttagtattgacaggacactttaaggggctgctgtcttcaaggttattttgccactcaatttttgtgtttttttttttctttaactcttggtaatttctatgattctagtagctttaatatttagcatttggggttctaggcgagcctataagggcttgtttaagagttatcaggcagatggcacaaatttacctcttttatggtcccagtaagttggagagggagagaaagaaaaccaacagtaagggccatgggttctgagtgacagacataagctactctgtttaaatgaatctgcaatttttggaaggaggatcttttctttcttatgtaactttctatacttattttgtgtggtttgattttaaaatgcccttcctctatcttactcctcatttcctcttggaaaatttcctttaaatcaggaaaatattgctttagcaaattacacttttaacaatgtcttatcttgcaaagctggaaaatggattaaaatctaatcttcttcccctttaacctagcctgggtattttatatgtcactctcagggtagatataaggatatccttttcaaacttttgactacatctaaataggcctttaaatagaactctttaaaaatgtccattttcatcccaagttcgatatcaaagtcaaaactctttaccgtttcttctaaagactcaaactgtctaacatcctaaatatttctctgctagtcttagcctgggaaccttagtgtccagtgacctatttaggttggaacaaagggcagctggcagggagtgtgaggagccccatgttgttctcaaccccatatgcagctaaattgctgactttcccaccttctagtacttcaaacacacatcacatcgaccccctactatcagtcaaatgagggaggaaatgctcactgcagagagaagcaaatttcaggaaccaactaaagtctctgaattatgccagtgatgttttccaaatatattttttgttttccaaacctcttacctttatttcagcaaacccagttggtcccaaaatttctcatccatatctaagtcctgaagtctaggcttccaatatggagcttatatctaacacaataccattcttgcaaacctgcttggcagtaggggagtttttgatcacctgtgacataggtagaaatgattgcagggtttttgaaattcacaggtaaaatctaaaggctaaaattaatgtgtagtgtgactcttccatcaagaaacattttacctgagtttccaataactagcaaatctgatttaaatatttcggccccatcaaccgtatataagaagagattcatactgaccagttctaactctggatttttgtggccctagaaatgaaaaaaaaatagtggaatcaccaaaagaaaataccatggtttagataatgcataaattgaattcctgtaaactgtagattgtcataaaggaatcaaaaaatgtttttccagtaccatgatataggaagatatttaatataagttcctgtgaacaaagagggagtaagagttatttccattactccttcaggatttctttacaatattcaaaagtcctttattttcgcctctgtggagtttgttttatatctcataaaaccattatcgaatagagagaataaaactgaataaatcatttgcaggtggaatctgctagagctagccacaagtacaaagcttgcacaggtgggcgtggcttctgccagtgtcattgctcattcccttcctctgagaacccccaaaagcatttgagaattaaacctgggagcctagtctttatcattgtgaccttggtagtgatctatttttattgttacaggcaatgaaagcttagaagaaaactatgtccaggacagtaagatggggtttgtcatcaatgccatctatgccatggcacatgggctgcagaacatgcaccatgccctctgccctggccacgtgggcctctgcgatgccatgaagcccatcgacggcagcaagctgctggacttcctcatcaagtcctcattcattggagtatctggagaggaggtgtggtttgatgagaaaggagacgctcctggaaggtaatcttttcagtaatcaatctaagtaaccttgtgagccttcctgtgccagacagatggcaactgtggcttcatctggttccatggtttctgggtgccatgaggatagatacaactaggtagcaaaaagtccagggataatatcagatgaaattaccaaagaccacaccactttttaagacattaaaatacttctttttcaacacccaatacccagtattctaccagtgccatcccctaactcacctatcacttgaccctttttccagaatgcttgggaccttcctgcaagcccaggaacctaaagaaattacacttggccagcagaaacctctcagaccttgccagcaccaggccagcatctttctgattgattgactatataccattctggttatgaaatattttgaatattacacctggttaaagagctcagtatgcaaagagaactaagtcctgcatatgtgtcccttctcctcaggctaacctatgtttgtgctaacatatgtcttggagcaagaaaggaaacaactttctttttgggattgagcccctatggcttattaatcaaacaaaaagcagatgaaaagtaaaccaaggtatatacataaaatcctctccaagccgttttacatacagtctgctctgcaatacttgttttgatactaccagttagctcaagcataattggtacataggaaattttgttagtatcaagaatagttgtgttcattcataaacagtttcttaggaaaggcataatcagaatggcagaagaattaacaccttcaggaagaaggaaaaaggccctcagcttggctaccactcagcaagcccagggtcttataggccctgtcacctgtcagtctacgatgtcccagacttagagctttttagaaaagcatatgctgtgttcaagtggaacatcaaatcatttaatcttcattgctgtaggtggatcattgtctttcttttacagataataaaactgggtatcagagaaactaaggaactcacctaatgtccacagattgcaagcggtggaggcaagtgctctcactctgaggcttctaatcttttacaacatcacactgccttttagcagatcctaaaattaggcaacgtggctggcaatcttcttttcggtttttgagaaagagtctcactctgttgcccaggctggagtgcagtagcacaatctcggctcactgcaatttctgtcccccagattcaagtgattcccctgtctcagcttcccaagtagctgggactacaggtgtgcaccaccacacctggttactttttttgtatttttagtagagatggggtttcaccgtgttggccaggctcatcttgaacttctgacctcaagtgatccacccaccttggcctcccaaagtgctgggattacaggcgtgagccactttgcccggcctggcaaccttcttaatgtcatttcagaagtactgtaagggactgtttgaccctaagtaagtctccatgtatctgtttgtgtcagcttgaagtcctgcacttagggagtaccttgtgagagctaagtggattctccctgttaaaatctgacagctctaggaaggataaacgatatcagtcattgtcagcaattaaaatgatcaatttatcagatttcttccaagctgctagttagatgggagcaggttttgactggaatgcgagtgaggtagatggaatgattcaggaactgggcatgtgaaaagcttcgaggaaatggtactaggagcaacaagtgagtctgaggttcagaacattgactacctgcctctgtaaaccctctttcatcctgtgtcccactggaccctaggctcaataagggtcagaattagaatgtaaaccttccttcatgattcccaaagataacatacaatgtgcctagcacaaggccagatgcatttttgacacttcatgtattcaagtttactcctcttctctctctacaagttatctaaaatgtcggtgcataattttagcttgtttcttctccatctttaattaaatattcaaatgttacttaagctttcccctgggtcttttcttagggatcatatccttctgcttgcaattggttggcataatccgttttcaatttctgtttcaaaaatctccctgtacttcctcctcctgtcataccatcgttcatgcttttggtccctcttgtaattatttcagttaatcatcacacaatgtaaactgaatgcattgagaggatgttgtaaatatgtaatttatagcataaaaattccaaaataaaaaccaacatgcctggaaggaaccctggggtcaaaggaaaagggcagtgttcagtaatacacacagtatgaggaaggcttcttaaaatgaagtcagtatttttccctggatatttttccatagtttttttcccagcttttgggactttttaaaaaaatgtgttttataccaaaatattgtgaattttttttgtttctaaatgctaatgaagtgtgaactgatttctcttatgaaaaagcaaatgaggaagctaaaataaaagtctttggaaactgatttaaaggaaaaagacattctagagccagcattgcagcaaagccttctttgtatgtgagaagctgtattaatgtaatctgaaataaaacacaaaaattcctggaaatgaaaatggaaattactcacatcaagcactcacaacagcacaacaggttctatagctctaatgaatctaaaatggaaagatatcagaggtgtagattagtgtcattgatcaacaggatgagtgtgagccagcagcccacagttaattctcacttggatatcactcagaaagatactctgaataactttctggtatgtctagcaactgggggctaataactctttatcagtcaaaagtcaacacagcaaagagatgaataatgtgctctgggtgtaccattctctcttctcattctaagtgcattttgtttacctggcaaaggagagctttctttactttcccagaataccttttcttttaggggacaactatttgtagaaattgcaagaatctggatgtggagaagccattagctaccctgtgggtgacagaatgcatttgcacattaagaacaagcagaaaacccaatcaactgacattccttgtctagattgaaaaacaaacaaacaaacaaaaaaactaggccagatacagccaatagatttcagatgccaacttagtttgattggctgtagcctcctggagtgttaggctgagagggattgtgaacatgagtcagtttagagagaaagaattgcaggaaggattaagcaggggcgtgtgagaggggcgagggatgaagagagctgatgaagaagagtatgtgttgattaattgccatttccttcagtcaagcacaaagagcaagaggccgtgactcatcttctagtccaggaggacgagcactttgcataggtactgcagaatagaatcccactttgcagaactagtaaggagcaaccaagcatgcagctttgggaaactgcagcattaattatagagtgaatagcaacatggaaaggagatgtaagaatgccagagttcccatgactgagatataaatggttatgccagtacaaagttgttctccagtattcgtatagtaatgaaaataaccagagtattttagggcattaatagtaatagaaatatgaatgaaatcatgctattgacttatagattgtcttccttcatttgggatgctgtagcaaaatatcataaactgtatggttcataaataacagaaatgtcttgcgcacagtcctggaggctggaaagtccaagaacaaggcaccaacagatttggtgtctagggaggacctgctttctggttcacaaatggcaccttttaattttgtccttgtgtggtggaagggggctagaaagctttttaaggctgcttttactaatctcattcatgagaactttgtcctcatggcctaatcacctcctgaaggcccttcctcctaataccatcaccttgggggttaggattttcagcatatgaatggaagggggtgaacataagcatttcgaccataggacatatgcatttgtcctgaatataaagcagttttttacatgtctatcttaataaatccccacaagaaccacgtgaggcttaaagagtttagtggcattcctaagtagtataatctactgttaaaatgttagaaaagagaccagcttgtacattctgatgttagatcttgcgttctttagattgcattgtagaatgtcctataccatatacatatatggtgtgtggtgtataacatgatgttttgatatactgtatgtatatagtaatgattactatagtgaagagttctaagtgcaggttttgccattgtgtagtgttccggcatttcaaattactgaaataactgataccagctatttggtttcaaaaatatttatcctaatcagggaagagattagtttaaatgtcagtgcacaagacattaaatcctcaacatccttagtaattaaagatgcctttctcagatttcttgctctattagcaccttaaaaacgttccagacttggtaaaactcatcccttttaatacagtgtaatgaaaatgacaacttaatgtgaaaaagaaatttggattaatcaaataaaaaattaatgttcttattgatacttattcaaagaataacttaataaaccataattggaaggacatgatcaacttagcaaacatagcattattttttggaggataagcagagagaaaagtacaagagtaatttaatttttagtgaatatggatgatacacagagattgaagaatggaatatacacatttgggataatcagaggaaacataagaaataagctaaaatattggcagtagctgatttaagatgattctagctttctcttgtttctattattatctacttaccaactttctttgttttctacattatgtctatattctataagacatgcacattgtgctctttgtaggtatgatatcatgaatctgcagtacactgaagctaatcgctatgactatgtgcacgttggaacctggcatgaaggagtgctgaacattgatgattacaaaatccagatgaacaagagtggagtggtgcggtctgtgtgcagtgagccttgcttaaagggccagattaaggtaagccacaaatgcattcttgcatggtatctgtgaggaggttggctgcctggacattagtaaagaacaacacagacaattttaaaaacataactgtctagaaagggtgtgccaggcttacagttttggctcttgagtttaggtaaaactgaaaagacaaagattaggaaacagagtgagtaaactcttagaatatttgcatagtctttacttgaatcacaatgatggactggaatctttaacacaatcttggcaggaaacggatgagtaatcaaattttaaaaatcaaaaacagaagtaaatgtgaaaaccaaagtcaataatagtgcttagtcatagttctagctattgttaaagaaagcagaagctgaacaatgctaaataagcaaacaaccaaaataccagaagttgaaatagggtaacacagactgcttatcattttccgtttctctacctagtcctttgattcttttgaaactggcatttttttctacaaaagacagcgtccccactttctaactattttcaggagctatttggagggtgggtggggcaagtgagtaactatgacatcagtatatatagaaaatgacaacaaacaagcatcaaatcctcggcggggtgtgctaaagaggcttcttgatgaagaaagcatggaggcaacactctctgtatcccaggctatttaaaaccaaactgggggatgcgctaggaaatggagcataggggagggattgtgaatggcagggtatggattagatgacctaatagatctttcccatccctaattttctgtgattcatcttgaggcacagacaggctgtcacgtaaatgtctcacagcacagctggagctggggtagatcaggcgtgaggctctggctcctgccatgctgacatgccgctgtaccattctttgcttgggagctgcaaaaacacccatggaggagagatgctctgataagttcactgaagggtccccagggcaagaatccagtcatataatgctaagtttagacagaggctggacatgctttatctcaactgactaaagaaaatgcaggatctgcaacctgtaccagcttttggcagctgagaagagctatcctggtggactcaaattctcagtcactccagccacttggacaaagaaagaaacttctgagatgagtcatcctagttttaggtatcttgtgccttctctgcagaagttatattaaaaatatttgatagttgttatgacaaccagtccatcagcatagactccattctcatgctgtgacacagtactggaggcctcatgccatggctatggtaaatctttgagttggtggatcatgggaaggtttggccaatgtgttctacatggctggggtcatgtgggggattcaggagacatggagacactgctagcttccaagcagtgcagaagtatttcagtagtctaagaatgtgtaaaagtagtatgtatgggctgattcctgactaggtggaatacttccacatgaggctgctgatgatataaggtatgttctctgaaatccacaggccccacatttctccttgcctgttatcatgagatgccagaccaaggcattctggttgcatcatcttttctgaatagtgggaaaaaacaggattatctgtggactgaagtcataaggtggggagaggacagaagccctgagcacatgcacttctgccacccaaaggatgtcacatgttggctcaggctgcctctccagtgtgggtgtagcattgagtctattgtgcagacaattactgggaaacagtttttggaactgcaaagttcagttttgcaggttatatatggaaaaaataaaacctggcaggagaaaacaaattgttgcaaggatttgctgtcctcaagctccctttcacaattccttactgttactctgactgccaggtgaccatgaatggctgctcacataccacgtgtgctcccctttacaccttccagaggagaggcctttgttctccccagttcaggggcaaggctgtccgcatttgtccctgcacctagacactgaagtgtttctgccatcatgtttgtgctatgcccatgcgtgttatcgaaggagatcccagaagttgttgctgagccattacagagcattcactataaatgcaaagctcctgggggccaattttagaaaattgtataccctgcagaaggaaaatatgcatgctctcaataccaacctggaatggaggtgaggggggatgtttgttttgtttctcataagcaccttgggaggtatggaaacaaatgaaatttgagtcgtatttaccaaataatattatgcacattctaacatcactaatttgccacctaccaggcccaggatgcatacagccagatcagtagccactgtcaagatataagagaaacaggcagcttgcaaggtgattgtaggacatacacttgtattaactgggaaatacagcctttaggaaagggttattttaaatatcaaatccatttaaactgctaaaataataatttgatgtcttttctgataacccacagaactttcttaagatcatttcctttgaagtagtcaaaaatccagttttcttatgttattgatttttagaattataaatatatcttataaatataatatctcatggaagaagagaaaaatttttgtcataccacaaacacaggtgaataaaataatactttttattgttgtgtgtaaccttagggtccactcaggaaaaaaagagcccatgtcagatggtttactaggggaaatttaatagaagaaaatggtcacaaaagtaaaatggggtactgaggcaactcaaaggtgaccaacagcagcatctactcccactccagagctacagggaccaaaggaaacctcacagctactacctctgagctatccctgaagtgggagagtgagggcaccctggtttttctcttctgcctcccattagttgctcctattttaccaaacccatccagaagacagctggcaagagatcctggaaaatgtagttcacaagtatcttagctcaggttcccttgaactttaccaactatgcaaggattaattgctaatacattaatggaagattcaatcctagagaaacaagaataagggggaaagggaagtgaggtatggaaggatggggaaaagcaaaacaaacaaaacaaggtgacatgttattgagcaggagattgcttcactgagcataactaatcacgtggcctcaagaggtcactggataggctacttggactattggaggaaggatgggagaggaatgaaagtgttcacttcatcctatgttctgcttcgtgtggccaaagtttatgctcacaggaagttacaggcagctactgaggaagccagagcccaggacttgtaacacaacacttcttcagattctgaaagcaatgtgaggagtgagagcctaggtgggtctcctatggtctgacctgggtcctgctatggtgagtccaacaggggcagttctggagcccagagcctactcaaagggagagagagacagcaagagatgacagaagatgaacgagcagtgactgagactgcagtagcagtcataacagcaatgtctagaactctccgagtgctgatagccaagggcccaagacacaagtacagccaaagagagtctggggcaacagataaaatctgaacagtgttatgcaagcaaacatcaggggccttgtgtgtgtgctggtctcacatacagaacccactgctgttttccttgctgtagtgaaggacaggaaaggggtagaaaggggaggaaaggtaaaggaaaagaaaatgctggaaaggagaagggaagtaatggagatcagggactaacattggtcaagtatgttcataagcaagtacaatagatgatttacagacatcatttcaattactccttaaaaggacccttttaaagcaggtattatcatccccccattttatagacgagggaatctgagacccagagggattgagtcacttgcccctaagctctctcagctagaaagtgccaaagctgggcttggagccagctcaaagctgttatcatcccacggacacatgttgttcaactatctttcattatatgaactggcacatttccttcaaatgcatatttcaatttctaagcctttattttttcaatagctcacaataaaatcataagtaataatccacttttaaaatgccgagggaacagaatccagaattcagcaagcaatatttgtgaaggaggctggaagagtttaatagagactgagacattgacagagaagtgagggaaaggatactgaagattgatttcactggcctcctgttctttcttcccctctctcctctctctgctctcttctcctgctttctttttcgtcttaagtttgtatttgaattcttttctccaagacgttggttttgggttgggaggttgcagtaagagaatagaggtaaccttacctcttcttatcatcacccagccaatcatgacagaattctggagatattaggtgaatgtggcacacatcataaatgtttctcctcatttacacatgccctattgctgtaaagtggcaccttatttatatagaacaaagtccacttacacatatcttacacactgtagactttagaattaactgttttcatttatgaaataagacattccggccgggtgcggtggctcacgcctgtaatcccagcacttggggaggctgagacaggcagatcacgaggtcaggagatcgagacaatcctggctaacatggtgaaaccccatctctactaaaaatacaaaaagttagccaggtgtggtggcaggcgcctgtaatcacagctactcaggaggctgaggcaggagaatggcatgaacctgggaggcagagcttgcagtgagccgagatagcgcctaggtgacagagcgagactccatctcaaaaaaaaaaaaaaaaaaaaaagacatttcatctgattttttggaattatctactagagacataaaattttcatcttaaaaggcattagaaatgtggccctaagaaaagaagactgcttaatttaaacctctagcgtgctccttgctcaattttagcttcttatatgactgattttttcatgggtgagcaaagaggccaaagagcagattcattgagaatcaaagcaaagggaacatgatcattctcattacgacctaagatacgcttaaaaatggatggaactaagagagtccactaagaaaccatttatatttggctggaattggaacgttaaatgtgcccaggtttgtgctgcaagcattattaaataatgctgctacaggagttcgtatctggcttttcctgttagtagatatagctacttgagacaaattgccagtggagaaaacttataatttctaataatatccttctttaaaaaaattaaattgctcatattaattttcagatcgacacctttcaccataggccattgattaaaatgtagccaagttatgttcggtcatgtctcttcaagcctctgcagagattggagttagggtctcagattccagagcatttgtcatcagcaacctaagatccttccttagctcccttattttaatatcatttccctcttcctctgtacattttcctgctattcaaagagctctctatatttacagttgcttagttaacctagcttctgcattactgggtaaaagatgctgtttatctggaagcttggatacccattcttgaccacaatagtcaagcaattagtacaaccctacctttcctgataataagaaaaggaatgtgataaggtgaaagttgatctctagaacgtaatataaaatctatgtgtatgtgtctatgtatgtgtatgtatgtatacatatgtgtgggtatattattaatatatttctactatgtgtaatcagtccttcctgttgctttatacagaaacagctacataaaataggtgtgttctcagctatttaaatggatgatgtcctcaaggagaaaaacaactttaataatgtgatagatgaaacttgtattctatggaaatcagctagatgaactttgaaaagccttatcatttccactttgcagtgatcgaaacattgcaacatgtttgtccaaatataggataacaaaaatatgctataacaccatttcctgataagagctaccactcaaaagatattgcccctctgttctcactggcagtggttggaaggttgaggaaatggcagcctaaaaaggcaggggaaaatgaggttgggaagaggatagacgacgcatccgcttctacctttcctattctcacactgaatccaagtagctcatctgctgatttgcttctaggtcacattgtaaatcatgctgggttgacgattttatactcaatttttccatctgcaattgctcccagttcagagtttaaagtgtgtcacattgtgactgtatttccttttacctctagctatttatttttgtttttaggggctacaccatagaatatagaaatagtttctttctcctccagtgcatgtgcttcaaaattgcttgtatgcatttgctttcctccacgacagtgtgaggaggaattttgtcttgaatatgatagcaagagaattgtttagaccgaaatctacctcaagtaaattatcctattctgcaaacaatcatcactatctgattactacctgattggcactggcatatcatgatcctgtccccatgacccactccagccagcccagctggctatagcttaatgagattattcctttttctttaactatttcatgcctactaacgtggattatctttgaacactttttacatctgtaatgagtatttttattcttgtccagctgtgtcttaaaattttgaccaaattaatgaatacctctcttttgttctcattttgaaacataaaagaaaatattaaaaaatagtacaatagttactcgcatatccaccaatctcattccagaattataaatcttttaccacatcacgcctctctctctctgtctgtctttctccctcttcttctattttttttttttttggaacaatttaaagggtagaaatatcatcaaattttataccttaatacctcagcttacatcttctaataaggacaattctcgtataattatcaaaccagctaagaaagttaacaataacatcttcagccgtaactgtcacatccacctcagcttttttccctctttgtgaatcaaaacaaactaaccatctaaatcatatagttaatgtaaccattttggcatccagtaaaacaatgattcagttcctccactgtgtaatatcttctcaattctactgcaaaatggcaagttctgagtacaaattgcccacaggcatatcaaagaatcttgtacttgagaagtctataattatgtaatgatgagatctgcctgtgctactaaaattttgaaaaggaattgaagtccaaacattgtctttagtgtcttgttgtgaatgtaaaaaaaaaaaatgaaattactgtagtatctttgaatgagggggaaactttgcaaacacagtcatagtgaaaaattccatggaaatatcattaatttatccacaaccactatgagtaatgcccacaccttcaccactcccactcagacctatatctgtgctgttctcttggtcactgaacttttttgttattacctcagatccagccccttcgtcactttcagggacagatccccatggagaaatgctgtgaatcatgggctattgggcagaacaggggacacagcaaggctgacatgtctttggtggcagtgatgtaagtgagccacatttgattttttaagtagacatttattaaagtataatatacacacagaaaagtagcggagggcagcacaagtatgaaaatgcagggtactcatcctacctagccttgctctagctgtcccctctgcctagaacactctttcaccagatagctacgccctttccctccctcaagattttacttaagtggcaacatcttagcgggaccttacctgaccaccatatgcaaaatggtaaccccgtatttcaggtgtcttcctatcaggacgaggaccagagtgaggcaggcacctatggtacagacttcaaggaggcggtcactctcaaggtcctgaaagctgggtgaggacttgcacgtccctgagggagaaagtctctttaaatttggtccctggacatttcccttgcctcatcttggtttctcccctgtgacctattcctctttcttgctttagtttttccaaagcctttttttgtagaatgacagctcctcaaaggtggggatagtatgttttgttcactgattattttgagctttgatacagtgcctgacacattgcatgtaggctaggcaatcaaatgcatatttcaaatgaatgaatgaatgaatgagtcaatgaatgactgaataaatatgctctccataggcatttttattgacacataataatcgtacatatttatgggatacacatgatattttaaaacatgcacacaatgtgtaatgatcaaatctgggtcagtgggatatccatctcctcaaatatttatcatttctttgtgtttgggaatattccaattgttctcttctagccattttaaaatatacaataaattattgttaactatagtccccctattgtgctatcaaacactagcatttattttttctatctaactgtatttttatacgcattaaccagtctctcttcattcacccctctcctttccccttcccagcctcaggtaatcagcattctattttctacctccatgagaccaacttttaaaactcccacatatgagtaagaacatgcaacatatttctttctgtgctttgcttatttaacatgatttcctccaggctcattcatgtttctgcaaataacaggatttcatatacctattggccatttgtatatcttcttttgagatatgtctaggtttttttccccatttttaaaatcaggttatttgttttcttgcccttgagttgtttgagttatttacatattctggttattaatctgttgttgaatggatagtttgcaaatatttttgcccatcctgtaggttgtctcttcactgtgttaattgtttcctttgctgtgaaggagctttttagcttgatataatctcatttgtctatttttgcttttgttgcctgtgcttttgaggttttatccagaaaatctttgccgagaccaatgtcttgaaatatttccccaatattttcctctagcagtttcatagtttcagctctgacatttaagtctctaatccattttgaatttacttttgtatatagtgagaaataggggtttagtttttttttcttctgcatatgaatatccatattttcctagcaccatttattagagactgtccttcccccagtgtattttcttggagtctttgtagaaaataagatggttgtaaatatgtgaactcatttctggactctctcgtctgttccactggcctatgtgtctgtttttatgccagaatcatgctgctttaattaactacctgtgtagtgtatgttgaagtcagatagtgtgatgtctccagctttgttcttttgctcaagattgtttggttatttggattattttgtggttccatgagaattttaggatttttttttctatttttattttttacttttattttagcttcccagagggtacagttttttacatggataaattgcatgccactgaggtttggtgtagggatgatccagtggcccagttggagagctagtaccagacaggaagtttttcaacccatggcccccatagtagtagtccccagtgcctgttgttgccatcttcatgtccatgtttaccgagtgtgtagctcctgcttataaatgagaacctgcagtgtttgcaagttttctattcctgaattagtttgcttaggatgatggcctccagctgcatctgtgttgctgcaaaggacatgatttttcttttttatggctgtgtagtattttacagtgtgtatgtacctcatttttctttattcagtccaccattgatgggcatctagcttgattctgtgtttttgctgttgtgaatagtgccatgatgaacacatgaatacatgtgtcttctgtgaagattgctattggtattttgataaggattgcattaaatctgtagatcactttgggtagtatagacatttaaactatcttatttcttccaagcgtgaacatggaatatctttttattgttttgtgtcctcttcaatttctttcatcagtgtgttatagttttgattgtaaaaatattttatctcttgggttaaatttatttacaggtattttttggtagctactttaaatgaaaaatgcttttttatttcttcttcagattgttcactattggcatatagacatgccactaatatttgtatgttgatgttgcatcctgcaaatttcctgaattcatttatcattttctacagtttttttttgggggggggggtagaatctttagatttttctaaatagattattatgtcatctgcaaacaagttcaatttgacttcttcctttccaatttggatgccctttattactttctcttgcctaatttctctggctagaacttccagtaccatgttgaataaaaatggtgaaagtgggcaacattaccttattccatatcttagaagaaaaagatttcaatttttccctattcagtaaaatgtcagctgtggatttgttcatatatggccttattatgttgacagacatttcttatataactaatttgtcgagaatttttattattaagtgatgttgaattttatcaaatactttttctgcatctattgaaatgatcatatcgtttttgttcttcattatgttgatgtggtattaaaccatccttgaatccctgagataaatcccaatggattgtagttaaaaatctttttgatgtactgtggaatttggtttgccagtattttgttgaggatttttgcatttatgtttatcagggatattggcttgtagctttcttttttgttgtgtccttgtgtggtttttgtatcaggataatgatggctttgtagaatgaatttggaagaattcacttctcttcaattttttggaatagtttgagaataattaatactggtcttctttaaaagtccagtagaattcagcagtgaattcatctgatccaggacttttctttgttgagagatttttattactgattcaatcattttacccattattggtgtgttcaggctttccatttctttatggttcaatctcagtaggttatatgtattcaggaaattatccatttattctagatttcccaatctgttggcatatagttattcacaatggtcctctgtatttctgtggtatcaattgtggtgcctttttttcatctctgattttatttatttgggtcttctctctttttttcttagcttgtctagttaaagctgtgtccactttgtttatcttttcataaaactaattttttaatctgttttagtttttattagtttcatatttctactttgatatttattatttattttcttctactaattgggggtttggtttgctcttgcttttctagttcttttaggtgcattatgaggttgtttatttgaagtttttctacctttttgatgtaggtatttattgctgtaaacttccctttcagtgctgcttttgctatatactgtaggttttggtatcttgtgtttccacctttatttgtttctcaatttttaaattttcttcttaatttattcatggacctattggtcattcagtagcgtgtcatttattttccctgtagttttacagtttccaaaattactcttgttattgatttctggttttattctattgtgatctgaaaagatgtatgatataattttgattttttttctgattttggggtcttattttgtcacccaatgtatggtctatcccagagaatgttagatgtactgctcgtaagaagaatatgcactctgtagcagttagatagagtgttctgtaaatgtcagttaggtccatttggtctaaaatgtaatttaactccaatgtttctttattgattttctgtctgaatgattggtccattgctaaaagtggagtgttgaagtctccaactattaccgtatagcagtctatctgtctctttatgtctatgaatgtttgctttgtatatttgggtgctctgatgttggatgcatagatatttacaactgtcatatcctcttgttgaattgacccctttatcattataaaatagcctgctttgtctctctttacagttttgacttgaagtctgtttcatctgatatgagtatagctattcttgctcttttaaagactcagcctttcttgatgttgtgcaagtttaagtgaagacttgcatataactgaaggaaaggtatctaactttgttccctaggcccttttctttcttcacctctgtttctgctctgtaccctatttctttttcttgatttagttttctccatagcctttttccagaatgacagctcctcatgggtagtgacattatctgctttgttcactgattatttctaaccttgacatagtgcctggtgcattgtaggcactcaaatagaattttggatgagtgaatgaatgaatggtgaatgaaggaattaatgaataactgaataaatatctcttcattggcattttatttccccttctagagatatacttaatccattgtataagatttttgagctctttaacttcaataatcgggtctttccatttatttattcccatgcataacatcatgtgggccacagcgggtcactaaacagaagttgattaattgaatatatatatgccaacccctgagatacaattttggctctcagaataatctgtcatcatgctggcagccattgtgatactgggaagagcctaattcttggaaataacttgactgaggcttgtgcaaggtattgggtccatctacacgtcccctcatttgcaaaatgtacacaattaactgcaccctgtggagtaatcaagattcgtgtaattctatatagagtgcctagcacatagtttgacttaatatatgtcaactttttgatcattttatgttcttaccattttattatactttgtcggtgataaattacaatgtagtcctacattgtatgatatgtttatgtagttctatgtctcttttattccaattgaattcttcatttccattttttctttctctcatagtctatattattgccttccattctttcacgtacattgttgagtaactgatatgtgccaaaaactgtgctagcactgtgaatgcaaaggaaataaacatggcctcttcttttgaggaactcatagtgtaactggggaaaaacggatcagtaattagattctattgttgcccaagctctcaaagaggatatgaagtgctatagggacacaggctagtggagctagctcctttctcttacagctgactctcccacagttctttttactttttattttaatttttaatttttatgggtacatagtaggtatatatatttatggggtacatgagatgttttgacacaggcatacaatgtacaatgagtgcatcatggagaatgcggtattccttccctcaagcatttatcctttgagttacaaacaatccaattacaatctttacgatattttaaaatgtaaaatccagttattattgactatagtcaccctacggtgctatcaaatagtaggttttatccattctatttcttttgtactcattaaccatccccatctcctccccatgccccaactactcttcccagcctctggtagccattcttctactatgtccgtgagttcaattgatttgatttttagatcccgcagataagtgggaatatgtgatgcttgtgtttctgtgcctggcttattttacttaacataataatctcaagttccatccatgttgttgcaaatgactggatctcattcttttttatggctgtataatactccattgtgtatatgcattaccttttctttaaattcacctgttgatgaacatttaggttgcttccaaatcttagctattagaaaaagtgctacaacaaacataggagtgcagatatctcttcaatatactgatttcctttattttgtgtacttagcagtgtcattgctggatcagatggtaactcgatgtttagtttttttaaggaaactccaaactattctccatagtgattgtactaatttacattcccatgaacagtgtacaaggattccgttttcttctcatcttcgccagcatttgtcattgcctgtcatttggatataaaccattttaactggggtgagatgatatctcattgtagttttgatttgcatttctctgatgatcaatgatgttgagcactttttcttatgcctgtttgccatttgtatgtcttcttttaagaaacatctattcaaatcttttgtccgtagtttgattggattatcagatttttttcctatagagttatttgagctccttatacattctggttattaattccttcctagatgggtagtttgcaaatattttcttccattctgtgggttgtcttttcatcttattgattgtatcttttgctgtgaagaagatttcttacttgatgtgatcccatttgtccatttttgctttggatgcctatgcttgtggggtattgctcaagaaatttttgcccagatcaatgtcctggaaatgttccccaatgttttcttgcattttcatagtttaggtcttagatttaagtctttaattgatatttatttgatttttgtgtatggggagaggtaggggtctagtttcattcttctgcataggaaaatccagtttccccagcaccatttattaaagatgatgtctttttcctagtgtgtgttattggtacctttgtcaaaaatgagtttactgcaggtgtgtggatttgttcctggattctctattctgatgaattggtctatgtgcctgtttttatgccagtactctgctgttttggttattatagctctgtagtataatttgaagtcaggtaatgaaatgtggtttctccagttttgtcctttttgctttagatagctttggttattctgggtttttgtggttctatacaaactttaggatagttttttctatttctatgaaaaatgaaattggtcttttgaaagggattgcattgactctgtcaattgctttagctagcatgggcattttaacgatattggtttattctaatcaattaacataaaaatttttcaatttttgggtgtcctcttcaatttctttcatcagcgttttatagttttcattatagagatcttccacctcttttgttaattcctaggtatttaattttatgtgtgtgtattagtctgttctcccactgctataaagaactacctgccactgggtaatttataaggaaaagaggtttaaatatgctcatggttttgtgggttgtacaggcttctgattctcagaaaacttacaatcatggcagaaggtgaagtggaagcaggcgcacctgaacatggctggcagaaaagagagaaagtgaagggggaagtgctacacacttttgaacaaccagatctcatgagaactctatcgtgagacagcactaggagggatgatgataaaccattagaaaccacccccatgagtcaatcgcctcccatcagaccccttctgccacactggggattacaatttgatatgagatttggggatgggggcggacacagagccaaaccatatcagtgtggctattgtaaatgagattacttttttatttccttttcacattgttcattgttgttgacatatagaaatgctactgatttttgtatgttgattttgtatcctgcaacattattgaattggtatataagttctaatagttttattgtgcagtccttaggttttcccaaatataagatcatatcatctacaaacaaggacaatttgacttctccctttccaatttggatgccctttatatctttctcttgccagactgctgtagtgaatacttccagtactatgttgaaaagcagtgctgatagtgagtatccttgttgtgctccacatcttagaggaaaggctttcagttttcccccattcagtatgatactatctgtgggtctgtaatacatggcttttatgatgttgagatatgttccttttatccccagttttgaggagttttattaagaagagaagttgaattttaccaaatgctgtttatgcatcaatttaaataatcatatggtttttatcctttattctgttgatatgatgtatcggtatcgcattgattaatttgcatatattgaaccatccctgcatcccagggataaatccctcttgttcatcatgaatgatctttttaatgtattgttgaattctgtttgctactattttgtcgaggatttttgcatcaatattcatcagaaataatggcctgtagttatacttttttgatgtatctttatctggttgtgatatcagggtaatattggccttatagaatgagtttggaagtattttctcctcctctattttttgttatagtttgagtagaattggtattaggttttctttaaatgcttgatagaaatcagcagagaagcaaacaggtccctggcttttatttactgggagacgttttattacggcttcaatcttgttacttgttattgttctgttaaggctttggatttcttcctggttcaatcttggtaggttgtgtgtatccacggatttgtctatttcttctagatttttaaaatttattggcatacagttgttcatagtagccagtaatgatcctttgaatttctgcaatattagttgtaatgtctcttttttcatttctgatttttatttatttggatcttctctctttttttgttagtttgactaaagtttttcaactctgttaacttttcaaaaaaccaactttttgtttcattgatgtttcatattgttgtttttcatttcaatttgatttatttctattctgatcttcattatgtttttcttctactaatattggctttggttttctcttgcttttttagttccttaagatgcactgttagattgttcatttaaagtttttttctcttttttgatgtaggcacttacagctataaacttccctcttaatactgtttttgctatccacactatccataggtttggtatattgtgtttttattataattcatttcaataaatttttcaatttccttgttaatttctttattgacccactagtcattcagtagcatattgtttaatttccacgtagtttgtgtagtgtccagaattcctcttgttattcatttctacttttattctgttgtgatcagagaagatccttgatattatttaaattttttgaatgtattaatacttgttttgtgacataatgtatgatctatccttgataatgactcattatcaagaaagaggaagagaggaagtgctgagaaagagtgtgtattctgcagctcttagatgaaatcttctgtaattatctattagatccatttgttttatagtgcagattaagtctgatgtttctttgttgattttctgactgaaagatctgtctaatgctgacagtgggttgttgaaatctccagtcattattgtattggggcctgtctctctctatagctctaataatatttcctttacctatctaggtgctccagtatttggttcatatatgtataaaattgttatattctccagttgaattgacccttttatcattatatagtgaccttctttgtctcttcttatagtttttgtgttaaaattatattgtgttatatgagaccgatgctcttttttggtctccattagcacggattatcttttgccatccttttattttcagtctaaccatgtctttataggtgaagtgtgttttttgtaggcagcagcttttagtcagtctatgtcttttgattggagaatctagtccatttacattccatgttattattgataaataaggacttattcctaccattttgttatttgttttctggtagttttatggtcttccctcccttctctctttccttccttcctgttttcctctagtgaaggtaattttctctggtggcatgaattaatttcttgcttttcttttttgtgtgtgtttccattgtatgttttttgttttaaggttacaatgaggcttgcaaatactatcttataacctattgttttaacctcataacaacttaacactgtttcaataaacaaacaaaaaagaaaactaataaaaacgatatgccttaactttgtatccctgcttttaaactttttgttgtttctatatttatcttattatattgactatgtcttgaaaagttgtggtatttattacttttgattggttcattatttagtttttctacttaagagtagtttacataccacagttatagtgttataatattctttttattccatgtactattaccagcgaattttgtaccttgaggtgattatttattgttcattaatgttcttttctttctgatggaagtactcccttaagtatttcttgtaggatgggtctggtattgattaaatccctcagcttttgtctgggagtctttatttctcctttatgtgtccttcatgtgtgaaggatattttcatcaaatatactattctatggtagaatttttttttccttcagcactttaaatatgtcatcccagtgtctcctggcctgtaaagtttccactgaggagtctgctgcctgacatattggagctgtgttttatgttgtttctttgctcttgctacttttagaatcctttcttcatcctttacctaatactatgattattaagtgccttgaggtagtcttctttgggttcaaactgctcagagttctataactgatatggtttggctgtgtccacacccaaatgtcaaatcgtaactctcataattcccacatgtcatgggagggaccaagtgggaggtaattgaattatgagggcaggtctttctggtgctgttctcatgatggtgaataggtctcacaagatatgatggttttataaaggggagttcccctgcacatgctctctctcttgcctgtcaccatgcaagacgtgactttacccctcctttgccttctacttggttgtgaggccttggaggttgtgaggcctccccagccatgttgcagtgggagtcctttaaacctttttcctttataaattacccagtcttgggtacgtctttattagcagcatgagagcagacgaatacagtaaattggtactgggagtgggggactgctgtaaagatactgaaaatgtggaagcaactttagaactgggtaacaggcagagattggaacagtttggagggctcagaagaagacaggaaagtgtaggaaagtttggaacttcctagagacttattaaatggctttgaccaaaatgctgaagtgatatggacaataaggtccaggttgaggtggtctcagatggagatgagaaacttgttagaaattggagtaaaggtcacttttgctatacaaagagactggtggcgttatgtccttgccccagagacctgtggaacattgaatttgagagagacaacttagggtatctgatggaagaaagttctaagcagcaaagccttcaagaggtgaaagaggataaaagtttggaagatttgcagcctgatgatgcattagaaaagaaaaacccattttctagggagaaattcaagctgactgcagaagtttgcataagcaatgagtagcccaatgctaatcaccaagactatggggaaaatgtcaacaggccatgtgagatacctttagggcagcccctcccatcacaggtccagaggcctaggaggaaaaaaaggcttcctggattagttcagtgctgtgcatcccagccatggctaaaatgggccaaggtagagctcaagccattgcttcagagggtgcaagccccaagccttggtgccttaaacctggtgttgggtttgtggttgcacggaagttggaagtgtgtgtgcaccctagggatttggtgccctgcatcccagctgtggctaaaatgggccaatatagtgctcaagctgttgcttcagaggatgcaagacccaagccttggtggcttacacatggtattgggcttgtgggtgcatggaagagttgaggagtgggaacctccgcctagatttcagaggatacatggaaatacctgaatgtccaggcagaggtgtgctgcaggggtggaaccctcatggagaacctctgctagggaagtgcagaaggaaaatgtggggggtgagcccccatacagagttcccactggggcactgcctagtggagctgtaagaagagggccaccatcctccagaccccagaatgatagatctattccactgacacttgcactgtgtgcctggaaaagctgcagacactcaacagcagcccgtgaaagcagccaggagtggggctgtatctgataaagccacaggggtggagctgcccaagaccatgggaacccacctcttgcatcagcaagacctggattcagacatggagtcaaaagagataattttggaactttaaggtttaatgactgccatattgggtttcggacttggatggggcctgtagcccttttgttttggccaatttctcccatttggaatagaggttatttacccaattcctgtaccctcattgtatctagcattgtgtctaggaagtaactaatttgcttttgattttacaggcttatagatgcaagagacttgccttgtctcagatgagactttggagtgtggacttttgagttaattctgaaatgagttaagactttgtgggactgttgagaaggcataataggtcttgaaatgtgaagacatgagatttgggaggggccagggaggtaattgaatcatgaggtccagtctttcctgtgctgttcttgtgatagtgaagaagtgaatgattttataaaggtgagtttccctgcacattctctctcttgcttgcctgccaccataaaagatgtgattttgttactcctttgtgttccaccatgattgtgaggcttccccaaccatgtgaaactgtgagtcaaacctttttcctttataaattacctagtctcaggtatgtctttattggcagcatgagaacagactcatacaatacccttcttgtacttggatattgatatcttactctatatttgggaagttctctgatactaccttttaaaatatactttcaaaccctatctctttctctacccatctttaaggcctataatccttagatttgcccatttgaggctatttactagtttctgtaggtgcgctttattgtttcttttctttattcttttgtctcctctgataggtattttcaaatatcctgtctttaaactcactaattcttttctctgcttgatccattctgcattaagactctgaagcattcttcagtatgctaattgcatttttcagatccagaatttctgcttgtttctttttaattatttcaatctctgttaaatttatctgatagaattctgaattccttctctgtgttatcttgaatttctttgagtttcctcaacacagctattttgaagtctgtctgaaaggtctcatatctctgtttctccaagattggtttccggtgtcttatttagttaatttagtgaggtcatgttttcctggatggtgttgatgctagtacatgctctttggtgcatggacattgaagatataggtatttaatgtagcctttactgtctgggcttatttgtaaccatccttcttgagaaggctttccagatatttgaaagaacttgagtgttgtgatccaagctgtatctgctttaaggggctccccaaccctagtaacactgtggttgttgcagactcatagaggtaccaccttgattgtcttggacaagatccaggacaagtctctgggttaccagagactcttgttctcttcccttactttctctcaaacatacagagtctgtctctctctctctctctctctctctctctttctcactctctctgttctgagccacctaaagctgtgagtggagtgacacaagtgcccttgtagccaccacaactatgactttgccatagttgtgctgacctcaagtcagcacagtattggttctttctcaaggcctgctgaaaccactccatgctacctgtctgctcaaggccctgggctctacagtcagcaagtggcaaagccagccaggtctgtgttcttgccttcaggacagcaaggtctcccagagccctgtgtggatttggaagttccatctgggagtcaaagactagagtcaaaaaacttagaagtctgcctggtgttttatcatactgcagctgagctggcactcaaaccacaagatgcagtccttcacacactttccccctttccaaagggcacccatcagagagccctttggcatctttccaaaggtagaggagactcaccccatagtcactgccaccccaggccataaggagtactggcagactacccctgatgttcccttaaggcccaaggtctctgaagtcagcttgtggtaaatgctgcctggcctgggacatacccttcagggcagtgggctcctgtctggcccaaggcagatccagaaatgtagttcaagagtcaagctatggaatcaaggacccaggagcccatttgatgtggccatgctggtacttaagacaaagcccctttttctttcccctctgcttctcccaagcagaaggagttttgccccatatccaccacagctggtaatctgttgagtcttacctgaagtcagtctcagaggctcgctcaaggccctcaatgtagtacctgtgtatcactgttggttatacagggcccaagggcatttcagttagcaggtgataaatgctgccaggactgtgtcctttccttcgaggcaacaggttcgcttctggcccaggatgtgtatagaagtgtcctctgggagctagggcctgaaacaggggcttcacaactctgatgggtgccctatcctgctgtggcttagctggtatcctagatgcaagacaatgtcctcccaactctttcctctcctttgctcaagtggaaagaagaggtctcttttggagctaccagctgtacaggctggggttaggggaggtgtgatgccagcgttcccttagctgccccagctgttgtcccagtatgttatctgcccccaccagtccactgtctctgggcctagttcagccctaggactcacctaaaagttccaatccttatgatctagactgcctttcaagtttacttggagaaacagtatcctgttgcccttggtggcaaggtttgtaggcacttaagttcaaacccatggaatcagcgagtatcttctagatagggctggtttaaatgctccctctgtgggtgggcatcagctgagtttgatctggttttcccttctattctaacaggacagcactgagttcagtgcctcacaattactgtgttttccctccctcagcacctagagatgctctctgcatcatgctgcagcatctagagggtggagaaagggtggcatcggtgattcaggactgttttttctgactctacagtgcctctttcatcaatatgaagttaaaaccagatactgagtgtttacttgatttttgattctctgtagatatttgttggtgtccttggtgggggaggcagacaatcggtagaattctctattccgccatcttgctccacctaggggccagaaacagtttactctttcctacaattctaattaaagtagacccagttcctttattctttttagtctttcagatgtttctcttacaaagaaaattttctcttttacctttttttagttacttttccaccattatgttctcttgatgctgtttgctttctttcatccattctctaaataaaattttaatttaaacaaatccatttccggttgcttcagaaatgtagtcccaaagtggacatttaatttcctatggtataaatgttttaagacactcacagtgtacataaagtgaatcataacattgtgtgtagcagcagatcacctagtctcactaacaagcatagaaccatgtacacaggatgtaaaaagaatcaaaacaggtaggtcttagaaagccttagtccttccagggaagtttcagtgaaatgtcaaaacttttactatgactcagagttgacataaaaagcattttattgtgacaaaaattaaacacttattcacttattgaacgtatacatcatacaaaagaaatatcagttactatgacaaatataaaaataattttaaatttgtcactttgggggaaactagaacatatataagagatataagaacctaagatttaaaaaaaaaaaaaaaacaacttgtctgaatgtaacatatctcccccatatttgtaaaacaattagaggacaaaagctaacctgtggtaataaaatatcaactatatttttgttgattaagagttccacataaaataatgctttgaaagactcactgctctaaaatactcactaaagcatgtgacttttgtgtcttatcttggaagtagtgacatggagggttttatgtaggaaagatgacattctaaatagaaggtaatatgcatttaagcatagagactacccttccttttttcacagacatatgtaagaaattaataacagacaaagtcaggtacagaaacaaaaactaggggccaagtgaatacatgactgaagaagttatatttcaaaggtattaaaagaggaggcactaaagttctttgagtgacctaattatatttttgaaaaatattccattcaacactcatttattggctgtgtgttattggtatatttctgtgccttgatgactatgctgtgaaaacattgaaaagatggcatagtcctttcctttgaggagctacagactatttggatgatcttggcagctgtgtgcatcttactctggagtgagaagaaattagaggcatggtatataagtccctagatatatacaatggatgatactatggggagggagcataatttcagtgtaaattaataaagtctgagtctagagggttgactatgaagatagaaaggataaatttcatcttacagatattatatggcaaaagtacacatgcttgatgcacttcgtgcataaagaaagaggattaaaaaactaactccatgtaagcatccctatttttaattctgtattaaagatataagctaataacttattcattaatgtattcagtcattcaaaagctaatgtcaaacaccttccatgtactagttatttgcagaatctactttcaccagtcatcctgcataagtaaattggtttagcattattgtcttttgaatttgtctaattagcagtactaattttacacagggagaaagatacagctggttgaagtgacatacaataattcatgatggctcttactgtactgcttatcccaattaaaataagacagtagcatttacttattaattcaattttttctcatatcatttagaaaagatatcttttataatttaaatttcttatgcctattttgaagataggtgtgaattttttcagaaaagacttaattgactctactttcaaaagttatctgaaagtaaaagtaggaacagaaaaccttatacacttgctgaaaatattctgtcatttaatctttttatgtaattctaaaacagtggtataaatgtcaacctgatgtgcaggaagataattttatttttatgaaggctagagtttctatcattttaaagtatggcaataattagaatttagtttctgattttacatataggaatatttgatcatttttattgtgttagagaggaacttctgctcctagagatgagggattaacagagtccagacttagccttctgccataagcaactagaaatcttgacaaaatatacaaaacaactgtgttcagacattggaaaacagtacatgaccttgagttcatggaagtgaagggaaacaaacaaggtgaaccctaaaatcactcaggctttctgcctggagacagaaagacagaaataatttcctgatggttgttcatttgagagagaaaacaaatggagcttggccatcttgctaatttaagaagacagaatcagagtttgggaggaccaaaacagctagaatttgtagtgcaaagtatggaagaagatggatctatgcaaaaaaggagccacagaaattagcataggcattcccttgagtatttgattgaatactagtctacatgtcagccggctggaattttgagtccgagtaaggaacacttagtagggagttggattcccagagctgacatagagccagaaattttccaacttccagcagccagagtagagatatcttgttgaatacataaggaattaagtaaaagctcttggaaggtcatgtcttaataatgaggctaaactattcctcaaacagtgactattctagacttgctctaataatttaaaatcaaagctcaaagggaacaaactaagctgtaagttgcttaactgcatgctcaaacaaagtccaacactcattttaaaaaggaagaaaaataaatccgcactctacaccttaatgcacacaatgtcttgcatctagccaaaaaattgcagatttgaccaagtggcaaaatgtgtcacattaccaggaagaaaaccaagcaatagaaacagttccagaaattacattgatgttaaaattagcagtcaagggcgttaaaacacaaggataaatacgtgctaaaagatttaaaagaagacataaatataaaaagaagaaaaatgacaatataaaaaataacatattagaagttatacagctgaaaaataacatatctaagaaaaaaacattttaatggattggattaacagcacattaattgttgtagaactaaaggtcagtgaactgaaaaacatagcaataggaaacaggcaaatgaggcacaaagagaaaaaattaaaagctaaaagaaatgagcaaactctcagttacttgcagagtaatacccagtggtagactataagtgcaactgaagcttcaaaaggctgggagagtgaagcaggtcagaagaaaacctgaagaaatggtggctgtaaaattttaaatgtaatgaaaatgtaagcccaaatccataaagttcaacaaatcctaagcaggataaacacaaagaagtcattacaattaagttgctaaaaaccagtgataaaaaattaatatccaaaataagaaaggggtgatacattcagaagaacgaaataacaattatggcaggcttcttatcagaaactataggtgagacaagaaagaagtaacatcttcaaagcactgaaagcaaaaataataataataatctttaacctagaattccattccctaggacaatggaatgacataacatgctgaaatagaatatatatatacggtcaacttaaacttccataccaagtgaaaatgttatttttgaaatactaaggcaaaattaatactttttcaaacaaatagaagctgagagaggtcatattctcaggctggcatggctgtaaatgttaaagaaaggtcttcaggaagaagaaaattataccaggccaaaatgtggacctaaacaaagtaattaaaagaaccagaaatgtaaatatatggctaaatataaaatataatatctttgttattttaaaaaacatatttcagggataattgactgtttaaagcaaaaataataattcatttgggaagggtctataaaataaatatgtggaagtaaaatgtataaaactataacccaaaggacgggaggggaaaatggaagaatattactgtagggttcttacattatacataaagtagtataatcttatctgaatgtacattgtgataaattagtggtgcatattgtcaattttagagcaaccactggaacatagcaaagaggcctaactagtaagccactatgcagataaaatagaatgctaaaaagaaggcaaaaaacaaagaacatataggacagaaaaaagaaaaataagagatgattgatttgtatttaaccatactgattattatgataaatgtaaatgtactaaacaataaaaggcagaaattgtcagactagagataaatgcaagaccaaattgtgtgctgtctacaagacgtgcacttcaaatggaatgtgtttttatgtttatttttgtactatggagtgtgaaagtgtttaccaagcaaactgaaaatgggggaaagtttaaactgctcagatattaagcagctctccagtaattttgaactagtaattttgctaccagtacttgttatgatcttttgaattcactagagaaagtcaggcagggcaatacttgattcttctttcttagctatcattctgtttttatgtatatatagttgctcttgagtgaaattgtctaataattcagtttttcataattacaacaaaaattgtataattacttagctttgatgaattaaaaggttttattacagacttttttagtaaaacattacttgctttctcagagaagaaaaatatatactttttcttttttgagagtaataaatattaatataaacaaggattaaattaaactgtttcatttttaactctgcaaaaaaatgtagtcaaataactctataaaatgaattattattgaaaagcctccaaacccagcatggaatgaattgacaattccatccaaactctaaggtaatcaaatatatacaaattcacattcttaagattcctcagcatataagattattttcatagttagtctttttttctttattcataatctgaaaacaaatcctcatctgaaatagaagcttttctgggaaaactatctttaaaattcatgaaatatctatgttataggttatacggaaaggagaagtgagctgctgctggatttgcacggcctgcaaagagaatgaatatgtgcaagatgagttcacctgcaaagcttgtgacttgggatggtggcccaatgcagatctaacaggtaggaactgcctcacttggaaaccttgtgcctcactatttgcctttccaatgtgtccatccctcaaatgagaatgattagctcatgtcttctcaatgttaatttacaatgcacactttttagtcctcatgtcaaggagtatacataaacctcataagttttctataatctatattgaaaagaaagttcatgtaaatctaaataacaatgaattgatgtgtggtaggctatgctattatagagttgttttctgtttttctttaaattgtatttgaaggtatttctggccacctgaatttatatttgcaatcatttcttgaacatctactatggatgaggcactactataggccctaaaaatagaaaagtaaatgtcccagcttttattttgtataaaatctatcagggaagaaacatggaaaaatataatataacataacataattattaaaataatcatcccggcttttattttgcttaaaacctatcaggaacgaaacatgaaaaatataataaaacataatataattattgaaataatagagatatctataaagtgcataaagtttgttaagcaggcaagaagatgaaaggaatttcaggcctaaagtagaacacgggaaacatgaaagtttatgacacatttgcagaaaaccatagaacaagtatgtggggttggtaggtagggacaatggtccagtagggtagtggtcagaaatgagaatagacaaggacactgatgggatggcagagtgcttctgtgtgacattcctctacatgtttggactttggctttgagcacaggagaaccactaaagaattttaaagtggtgaatgacattatgatacccgcatttctggtatgcttcttgtagtggtataggaagttgttgtattgatgcaagtgagttacttgaaaaggtgtggattaggacagctacagtaggaatggaaaggaataaatgaaacagatgattcactagtaaaaccaatggaactcagagggattgattatatgagtttgtaagtttcctaagagtgatgttcatataaatgaattttgtttttcacacatcttgttatgagcttacagaggagaaatgattcataaaactttgcataaattttaggagccatagaggcttttttatgtgagtacatagacactttgtcatctgaataatctagcccctcgtcttatcatcttagaaagagggagctgaggcctagagacgtgaagttgtatggccaaagtcaggaaaatagtgagaagcagaacctagtccactaacccctgactccatgtctttttgggtgctgttgaaaatcatccgtaaatgtaatattcttgatggttggacatttttttacttgtttccaagtaaaaatatgcaactaagaaatcatgcagtttattcagagtacataaaaaatgactaggtaagtagaactaggtcacgtaactaaaattatactaagtgacaataccttgtaaaatgttaattttgttagaaaaaagttaaactgagcagcagaaagcttttgtaagtcacctagtacaaaggtcctttttaaagagaagaaaagtagatcagaacgtttttgaaggtatgaactgcatctcactcatctttttatttgccagctaaatttcatgcctaaaaattacccaggaattacccacctccagagattccgctttgctcccgctggagtggaactcagcagatcctgatgcaattactctctgtcccacccattgagaaacaccactctctggcgcatagcctgatgccttgaacataatagctacttaatacatgtttgttaaattgagggaattaggaagaagggactcacccagggtcatcgaggtcaatgcagttggttaatagaaaaaccacagtgagcattcaagattgtttgtcactggatctaatgaatgctctcactctgccatggttgcatgcaatggcctggcttggaaaagcttttccaacctcattttggactcatgccttccctccacttacattatttctcttcaaatttgtatcctacttcatggtgtgtgcctcctgccaggcctctttttcttgtataagtaggtccgcttagatggccattgtgtttgagagctggggtttactgacagtcattccactcatctgtttgactgagatcacagctgactaggaaaaagctcaaagacaaaagtgacctctttatgaggttaatcttagaagtcagaagtcttggctttgaggtacaaagatttttctcttgtctacattttttgggctttctccaacttctcctactgctctatttcattttcattagggcttatctcacacattaaaaaaatttctatcctattttaaaacactaagataaaaaagctttttaaaaaacatgatatgatgtaatagtggaactcaaggtcataccttttattccttggagatgctctattgtgggattattgcatattttctgtccactgccaaatgctcatttccgttgattagggatctttaacttggtaaaatatttttaaaattctccttggttaaaaatggattaatattaatacaattacatttctaacgatttaatatgccatgagctatcatatgcataaaagtcactttaacattcaaatgagttgagccagcaactcctcagaccatgcccttagctaataacaacaggcatgcagctgcgactgggtcatatattcagatgattttgcaaatcttatctttagggtctttcacaatatagattcctcattctaatttatactaatgtcttaatgatccatattgattctgcctttcttttggtctcttacaggaaatcccatttaccacttgcttgatgccatgtcaagcacagagcaagggcatagtccgtgccaatgtgttgtgggtgttaccatggtagcggtagttatgaaatgagaaaacctatgagaacagaatactaaaaatcagtagaattactcagaaaagtaaacgcattgcctttaagtaggtgtttgatttatgggtaattttttttcactaaatattagttaaaatgagaaatcattcttctttgaaaaatagtgtattctactgaagtaaaatatactttttatttttaatagttggttaaaatatacttaaaatcactttaaaagttagctacttttaatatatactccatacattataatattaatgaataaaaacaggtttactgtggtttttatttccattaaaatgtggttttttttggctatgaagaaattagtatatttcttagagaaagtgctttttgaagctgttaaaaagtttctcatattttcttcttgtgaaattgcacattttaattcagcacttaaatttcacactttatttcttgtgatacaaaaacagggatcttttctaccatgatatacagcttgacagtagtttaacaatttgtggaccaattatatgtaatccaatgctactaatttatttgtagaagtaaaataagaatattcctcaaaaagacagactacgctacattttctcattaaaaaaaaaaacggaaaatgctttataaacattaactaattttaacaactttttttccattccgacagttgttgtaacctcttacactagtatctactaatttatttcattctgtaataaacactaccacctgttttgtgccaggtactttttaaaaactgggaatatacaggtgaattaagcaatgtctatatcctaagggaggagcttcatatgaaactagccatgtaaacagccaactataagtcctacaatagagttatgggtaaaatgtcagataaatatggagcggctgtttttccctgggaagaaaaaagcctttgcagaagaagggacatttgatctgagcactgaattacaaacagaatttcacctggtagaatttcattgaattgtaatagaattactatttatattgattttaaaacaatcagggaagcattttgatgaaggtttatatgatcatgatgtagtattgcaaatgttatgaattacctcaagacgctttgcatagagttttatttcttaatttatgttaaatttgacttgacctaattggaaaaaagtctgatagtaaatttcatcctcctccaatacatctggatcatataagatgtactggatcttataaggatcttataagtaccctaacatttgattcaaaaattagaagtagctaccagtcctcagatcagagttattgccaccttgctttgattttgctcagtaatttgtagttggcttgaaggaaactgacttgtctgatagctctgagttctctgtaataaccctaaccataaacatttgccaggacctcaagttcccaaggttcagatatgcaaagcacaactctcacaaagtcccccttttgagttctgaggttaggtggacgctactcaccactggttgaaggtagtctcccctctttctagttttgggataaacaaacacacctggaggttggataactcttttttaaaaacttcaaaacaggatctcaaagaaagccacataacatgacattacataattggacaaatgacattacagctaattccctcaagatggcaaagctaatgtttctcaaatttaggataaatttaaatttatcctaaataaaaaataaagaaagaaaagaaaaaaaggaaaaagaatctaaaacttttaagaaacttactcaaaatatagattctgttttggatggttccagattggcattgaaaagcctggtttccatatatgaaaaagaatctagcatcttcccaagagataaagcaatcatagtagaattgcaagtatgtttctgggtgtcatgacaaactgctactgttacaacacgagagtacttacatcccctctagcataacaacattgttcttcatctgtatttgatgcactgtataggacagagttattttatagctagatttggacaactttatgattatccttggagaggccttagtatctgtccttgactattgtcctcattaggggaacttggatttacgatatgcagtttaaagtttaaaatgtgtttggtggcaaccaaatcctgtttgctcactgatggattttgcctgaaatcaccaattagcttgatttggctacatgacttgggggtgataaaaagattccactgaaacttctgccctagctaacccaaagccaatattcatggtagagatcctggtagtccaatccacagttaaagtctatccatgtgtgaataagaacctagagagcttgcacctggttatctcttggtcccttggtgttgacatgcactgtctttctcgcaccgtattagaccttttgactttaaataaaattgttacatgagtgtcttctacaagtcttctgaatcttttcaaatatctaaactcatgcaatctttgcatatgcagagtattgttattggaaaagttagcataacatacctttatattatttcttttttaaaattatacttcaagttctgggatacatgtgcagaatgtgcagatttgttacataggtatacatgtgccatggtggtttgctgcacccatcaacccgtcatctacattaggtatttctcctaaagctatccctccctttgccccacactccctgacagtctctggcgtatgatgttcccctcgctatgcccatatgttctcattgttcagctctcacttatgagtgagaacatgcaatgtttggttttctgttcctgtgttagtttgctgagaatgatggtttccagcttaatccatgtccctgcaaaggacattaactcattctttttatatgactgcatagtattccatggtgtatatgtgccacattttctttatctagtctatcattgtgggcatttgggttggttccaagtttttgctattgtgaatagtgctgtgatacatacctgtgcatgtgtctttatagtagaatgattggtaatcctttgaggatatacccagtaatgggatcgctgggtcaaatggtatttctggttctagatccttgaggaatcaccacgctgtcttccacaatggttgaactaatttacactcctaccaacagtgcaaaagcgttcctatttctccatatcctctccagcatctgttgtttcctgactttttaatgatcaccattctaactggcatgagatggtgtctcgttgtgcttttgatttgcatttctctaatgaccagtgatgatgagctttttttcatgtttattggccacataagtgtcttcttttgagaagtttctgttcgtatcctttgaccaatttttgatgcagttgttttattttttcttgtaaattaaagttccttgtagattcaggatattagccctttgtcagatggatagattgcaaaaatgttctcccatcctataggttgcctgttcactctgatgatagtttcttttgttgtgcagaagctcttcagtttaattagatcccacttgtcaattttggcttttgttgcaattgcttttggtgttttagacatgaaaccactactcaaggaagtaagaggacacaaacaaatggaaaaacattccatgctcatggataggaagcatcagtatcgtgaaaatggccatactgcccaaagtaatttatagattcaatgctattcccatcaagctaccattgactttcttcacagaattagaaaaaactactttaaatttcatatggaaccaaaaaagagcctgtatagccaagacaatcccaagcaaaaggaacaaagctggaggcatcacgatacctgacttcaaactatactacaaggctgcagtaaccaaaacaacttggtactggtaccaagcagatatatagaccaatggaacacaacagaggcctcagaagtaacacacacatctacagccatctgatctttgacaaacctgacaaaaacaagcaatggggaaaggattctctatttaataaatggtgctgggaaaactggctagccatatgcagaaaactgaaactgaacctcttccttacaccttatacaaaaattaactcaagatggattaaagatttaaatgtaagacctaaatccgtaaaaactctagaagaaaacctaggcaataccattcaggacataggcatgggcaaagacctttatattatttctcgaatgatgtccaccaacagtagcttaatataactaaattattgagttagtgtgatgattgtctctagtatatctaggctcagataaattcctcttagtagtaagagaaataataaagatgaactcagatttttatagctttaaatcagtaaggaaagaagtatgaataagcaagaatatacaaaggagagtatgatatatacaagaattttataatggtgatcttgcacagaagatcattatatggttattagcatgctccaaggtctttgggtcagcagttaacttccatgccctttctgcttctggaggcttttgcagagcttcagtttaaaattactaatgggtgtaatcatcagtgtatcaaggttccctttcatttttctagagggttgggaatgatgaggtcatgaataaatattccggtgaaaatgtcctcatatcactggatttataaattagaatgtttcagctaagaaatacaaatgtaattgtattttagccattgtgaggattgtggcttttcaacaggggaacgcttaaacagagtcataaaataagcacgctatttgaactagtacctagtaataaatcatagagaggcacaaccatatacaatccatctggagatgctcaaaggtttcttttgcaattttatcaatgtcccatacatttttttccaaattaatttaattacaaatgaagcatgagctggacacatcttctgctatcctgaaaatgtctttccattgctgtttaattggccaacttgtccttccagaataagttgcctcatttttcatgagatgtactgagtgttcacaaatattcttcaaatgaaacttctgcttgagatatctacagattttcttccataggctcccaaaccatagagagcagagaccttttagttggtttactgaaagatccataattatgttgatttgggttatttactttttaactctatctggaaatgtcaagccacatattagacattttctaaattggtaattttaaattataactgttttttcctcatttgattcaactaattcaggaggtctaagcctacctacagagggagagaatatggtcctttttaagttagttgttgagtctatttcagaactatttgaaagtttcctaaagttttttcttcatctttatttagtttacaactttgaatatttattgaaagaaaagcttctgaaagtgctttatgcaatgccttttctatttttcttttttaaatgttacaccactgggttactttaatcttctcttttctgctcttgcatttaaacatttttctccatcaaaggctaataattaattgaattaattggtacatacttgtagtatggacaataagtatctaataaaatttccaaattctatagcaaacattatgttctgtattcatgaagtttaggaaaattattaactataggtcttaatttggctttataccagtttctttaattcaacttctatagatctgacttgtgttctagaaagtttaaaatgttatactattttctggtaaaatctctgatgacagagtatttcatttagagagtcaggtaaagttgcatagaaaaagaatgaaatgaaaagaaggtagcattcagaaggttaccaaagccttgacaaaaatcatctttgaattggaaaatttgtttgcaggatgacagctaaagaaactgacaattcactgtggtattttatctcctaatttgtctagagctccttgtaaatattttaatttattgatttcatcataaattagttcccatatggccaatgttattttaaatatctattttcctacctatccatcatctatctatctatctatctatctatctatctatcgtctatatatatatatttatcatctatgtatcatctgtcttgcctgcattgggaaaacaaaaataaaattaggattagtatgtgactttatataggaagaataagttcttccagaaaaaggtttgtatttagacagagacaaatctctgatacacaaggaagagaggccactaagttctgtcaaaagtgtgtgcttgccaatggtgtcttagattcccaaagcaaacggagtgtaggaaggcaacacacaatcactaaaataaagtgatctttcataagttgacaacacgggaagtattcttgtaaaggttttctaagaaacctaaggctgagtgacctaccacttttggcaaattggttatcaatttaaaggagctccaaacattagcactcagggccagcttggattggacacttcttaggcttacatgttcctctaatgtttatgaactatcccttatattgtcaacagaaaaaggtgattcaaaacaaaacaaacacacaaacaaaacagaaaaatatggttcaaaacgaaacaaacacacaaacaaaaaagacccataaaataagactttgtgtatgtatgtaaataacagcaaaagcaaagaaacagcaagggaataaacagatatggaaaaaaatatttatcaaattgtgtatctctaaagtgaactatttattgacataataaaaagcttatgtctaattaccaaatggtgcatttcaaaaccaaaggttatatgacttaatatataaagatacaggtgaaataaccttacacaaagacctaagtttaagtgccttctatataaagacctacatgattacaaatcctaggacaactacataaattcagcaacaagagctcagtaaaattagccagagtgagaaaattattgagaatgactctcatgctagtacatgggaaggacagaatgcgggcacgagggggtccagtgagtgaccctgttgatcagagcatctcctggaatgttatcaaataaggagtcttcaaaattatcttggtgaagcctctagaaatatgaaacatggtgagactaaatacataaaattttttttaaaaagcacaaaagctggctgggtgtggtggctcatgcctgtagtcccagcactttgggaggccgaggcaggctgatcaggagatcgagaacatcctggctaacacagtgaaaccccgtctctagtaaaaatacaaaaaattagccgggcatggtggcgggtgcctgtagccccagctactcgggagactgaggcaggagaatggcgtgaatccaggaggcggagcttgcagtgagctgagattgcgccactgcactccagcctgggcaacagagtgagaccccgtctcaaaaaaaaaagaaaaaaaaaaaaaaaaaaaaagcacaaaagctaaacaaattgcttactatagtaagggatagttatgctaggcagatacattttctctgagcagaagactattcattttatatggagtttttagaaagtgtggagtttagggattgaaaaccttgcagcttctgagagctggttgacatcacctgtagcaatacgattactcacatgagactgttgattagttggcactcatttattgaagtgattctgatcctgcctgagtgattatcagaagtaagggctgacagtgcttgcttggcatccaaacacatgttcactgaggcaagttgttgattgactgacaggtttagcactggttctggtggttccttgttgccatggctacagaacaatgagtcttttcctaaatttatggaaatgactttattctcacaatttgggaaatattggcccagaccaaatattttgtgattacaaaattctgtgaaggggttgtcccagagcctgacaaatttttctctcactctgaaatacaaaatacattttattctccatctagaaggaaaagataagccaggaatttaggaacaaattctagtctttcctttcaagagatgggttaggggagatttcattcttcctggatatgtccactagaggttactaactcaaaggccctcaggtttcagatacagatcattcatgattcatgagaagagtgagatttaaggtataatatagagttatgcaggaaacaggagaatgcagattcttctaaagaagtccatgaaatttacattgaaaacactctgctggccaaaaacgacttgtctatgagctggacttgcctacagacaatggctgcatcaaaagaaaagttttgttagtttatttcttaataatttattctatcccattatcaccatttaaccctcactggaaataaagttttatttgggtgttttctttttctgaacatgtagaaccgagtcccattcacagaatgacatctatttataatgctgatgttggaagaaaagatcatttttataggttcaagtatgtcacattaggcttgtaataagattaagtttggggacataattgtccaggtaagacaatgatgtatctttatttgtgtaatagtgtgcatttttaaaaaagcattaaatgctgtaaatcatgaaggatgcaaagatgactgtgtctctggtaattaataggcaagttgttattcctagcagaaaccttggattcatgctcaaatgatttttctcatcacaggctgtgagcccattcctgtgcgctatcttgagtggagcaacatcgaatccattatagccatcgccttttcatgcctgggaatccttgttaccttgtttgtcaccctaatctttgtactgtaccgggacacaccagtggtcaaatcctccagtcgggagctctgctacatcatcctagctggcatcttccttggttatgtgtgcccattcactctcattgccaaacctactaccacctcctgctacctccagcgcctcttggttggcctctcctctgcgatgtgctactctgctttagtgactaaaaccaatcgtattgcacgcatcctggctggcagcaagaagaagatctgcacccggaagcccaggttcatgagtgcctgggctcaggtgatcattgcctcaattctgattagtgtgcaactaaccctggtggtaaccctgatcatcatggaaccccctatgcccattctgtcctacccaagtatcaaggaagtctaccttatctgcaataccagcaacctgggtgtggtggcccctttgggctacaatggactcctcatcatgagctgtacctactatgccttcaagacccgcaacgtgcccgccaacttcaacgaggccaaatatatcgcgttcaccatgtacaccacctgtatcatctggctagcttttgtgcccatttactttgggagcaactacaagatcatcacaacttgctttgcagtgagtctcagtgtaacagtggctctggggtgcatgttcactcccaagatgtacatcattattgccaagcctgagaggaatgtccgcagtgccttcaccacctctgatgttgtccgcatgcatgttggcgatggcaagctgccctgccgctccaacactttcctcaacatcttccgaagaaagaaggcaggggcagggaatgccaagtgagttatctgacctgtttgtctctcttttctcttcctttctctgtctctttctctctctctctctctctctctttctctgtctctcatatcttcctctagttttctgagttgtctcttccatttcccccatgtctttctcttcctttcttaatcttttctccctttcttaaatctcacattctgttgcagtaagaatgcagaactgaggctcctccctgttttcatttctttgaaagaaaaggagcaggaaacaatctttattcttgcctagaagcggaagcttcggttctgccagtaacttaccctttcgcatgggacctccttctatggagcatcattttgcccctgggggctgggtcagagaggcaagcactaattataatgtctagttctgaccatggtgaaagtagcttctggtttatttttatcattccggaatcacaccacttctaaaccggggtgaaagggaggaaaacttagcacctggagaaattgccatttcaaaatttgatcactactgagcaccaagtatgtcctaaaataagatcctgcaagcaactgacttatcatatctctcttatttattgaactggaatgtacattgtaataaacatgttccacgatgttatacatgaattgggtcatctctgctactgcaaagtcatgatcagaatagtttcttagtcataaagcaccaaaaaataaaaaaaaataaaaaaagggaaccaggtgataagccccaatcttgagactttgtgtgaacattaaagtccagatgaattccagatgaattctattcaaagtccagatgaattatatttctataattcttctgagttgtttttataataagcactttcctatcctttttctattttgagaagaagcatatgttaaatttgcatatgtcacctctttctgtgacccatgaaaacaaatttcatgtaacgttttttatttcaaaaatagcacggatgcttgaagttctaaaggtaaccgaagtatccaaagattaagtcattttctccaccagcagcattaatttcactctttcaaacaatcctttaaaaataaaaagttttaataataatcatgataaggtacacattgttaataatcattccatccatctgaacctgtcagcaggaacattatttccccctattttgtaggtgagaaaagtactctgctgtaaatttttataacttgtatttatttattattattattttcttaatcccaaatgtgatagtagaatttttgtaacttttcaatgtaattccccttagttattctttatttagatcttaaatgatatgatacttctcactttaacacatgccaaaaattctacatcctttaaatttcttggtttttgtatctttactttccaagaagcaacgtgggcatcttttgcagaatttatatactttgaggatctaacaagggagtctttgggaaaacatatctttgaaatccattttatggatttcaagtaaagacatccctaattttctcaaaactaggatgaagccaataatgtacgcttacttcttggtatatcaatttttaagtttgttataggatgttgatcataaaagtggttagccttttttttcctcttaccatgttttttttattctagccaaactcccctcaggagcaaactcctggcagggagttatcagggagcatgaaagcaaaccaacagtgccacgaaatgggaaaaaataattagacaattagtccagatgtaaaatggcatcactaacaatttccattaagagggaagaaataagaggaaagaaaatgaaaagaaagaaggcatttcttaaactggagtgttcacaaggattaaaagattcactttattgcaacacctatggttttctgagggctccattacaacatccaccattattccactccatgtttctaattaccttgcctttattatggttcttcagaagcttccttgtaatttttaggtatgggtcatttttgaaagtttttcttctaaccatttatggtaaagagaaaacctatataattaagttatcttgtgttggtgcccaggaatatgcatttttgaaagctctcccagtgattctatgtacagacagatatgggcacctgtttaagagaacagtgactaatgaagagtatgtagtgcctgctgcagagatgagttggagctatctgatgtcacattaacaatgctgagtatttctctcatgtccaggcattgctgcaagagattaccttcccacacctggaaccactttccttataaactgagagcattcccttcactattagaaatttagaaattaatttcatgtgggatcttgcttttgagagaaaaatcagcatggtctaaattaactggattggttgtctaggaagtgctggtttcatcagtaaactgttgaactattagctgcaatttatcaagcattattacattcatttaataagaaatatatttctaattaaaagttataacccgcagctttctgagtacaacttatacctactccaatatgcaccaagcaaatgagctgacccagagagggtatttgaggctaaccttctacggaaaacaatcatctgtttactcatttttctcatttgttctgctgttgctcctgttgtaactatgtgagactgtaattttagtatataaaaaagaatctcaatgctatgtttttacctttttattgccattttatattttcttagtttgtctccaaagttacaaaaagcacaaacagtctaatatttttacagcagcaaaaatctggtagagttttgccaactgaagcaaaggggctaaaaactctagagaacacatcacccaatgagtttattgctattctagatgtgtaattcctacatttatggtacactgagggtgttcagcagtctgcatgtgtagctataaacacagaacagatgctgtaatgaagagcttccaactgatctatctgtttgaacattgttttgaggagttgcaagtccaacggcattctcatgacaggctgtttctgagatacgtggttggaatgatgttgcgttgtctgtttttagcaaagtttacttcaattttttattttattcacagctgaatatctgacacaaccaaaggtttggacacttgctttacattttctggaatataatataggaggagtttaatcaatatactgggtgtttgggttgcttgagttatttataatcagaagtcccttcaggcatacttgtatcctgggagatcagctgaagttacctttgacacctctcatttctttagctttttaaaaaaatgaacatgaatggaaaaatatgcaggactcagtagactttaaaatattgaaaaaatcgatttattggcaatagaagaaaatgaaaatccctggacatttatgaggaagtaaattaattagatccaagtaatttaacacttccttttaaagaaaaatgagttaacattattcaactgaaaaattcaaatatcatataaatgacatgcttctttaaaaagtaattacatcagtgattacatgtcaatctaacatctctagttaattcctagataaataaaatcactgagtgccaaacaatttgatggcacatggagctaaaatgtgacaatacattcctatgatattttgcatgcaaaattgtgtacaaaactaaaaacaattacaacctttcctccctaaaggcatcagactgacacaaggaagtaattttaaaatataggttactaagtaaatggatattattatatgctaccttgattatttcttgagtatttgagtttttttttaactgagtcaagaaccaagtgaaattctaaatggaatgatgctcagaggaaattttccactttgttctctgctagaaatatattttgtccaccagtagaagcaaataagcctgcagcattagtcattatgtcctgggtaagcattttggttttctttcctctgattatgaaaagaaatgtattagtgagtttacagatatcatggccaaatggaagtggcgtgttctcctcttttttatttttgatacagttctcatttatgtctatagctctgctaaatttttattatttttaattgacacataataactatacctatttatagggtacactgtaatatttcaatacctgaatgccatgtgtaatgatcaaatcagggtaattagcacatctatcatttcaaacatttattatttcttagtgttgggaatattcaaaattctctcttctaactacttgaactattgttaactatagtcactataccctagtagaacttatttgaaagaactcatttactattctggctcacaaacaggataatcttgtcattttgtaattatttttctcttaatcacacaatatatagctttaaaagctactgtaattcttcatgatatttatagtaaacatcagaagatttattgaaacatttgtgatagaattttactactggatagtaatatttattgaggatcaatttctcattcattcatttatgtaatcaatcattgtttcaacagtaagcttaaaagcacttaggtacttgatatggtgctaggtagtcaagataaaatatatatatataagaggcaggccctgactgcaccaatcttgcaatatgggaagggagacactaaaaaatataactaaatgtactgtgctatgtgccatagtagaaaaccaatataacattctcagtgcccagggaagaaagagattaagtccagttaatggagtagtatctgtagaaggattggaaagatcttcgagtaaaagtagcatttgaacttgaccataaagcatgtttttcaactggagaaattgtgctatgctagactattttatatagagaaaataacataagtgaagattcagaaatgttaatgcactttcatgccacgatgtagagtttgttatgcatgaagcacgtagagagatgtagtgttgggcaactttgcaaatgcaagaagagtatagaatatagataatggttaatgtaccaagaggaagtttcagtactttttctataaatcacaaggtgcaataaaggtttttgtgaagtttcatcatcatgtataagctttaggggaagaaactgacttatagaaagaccagttaatagagtgccacagtaatccaataacaggtaaaaataaaagccttaaactagagcagtaaagttgaatccaagacatgcatatgaaaaagttttctgagcttaattcactagacttgaaataccagttatgcgagctgaaagaaataataagaaaataggactcttatgatttgagcccaagtgaaatactgctactattaaaacagataaggaatacaggaacaggacagaggagatattgacaagatgggtttcagattaattaattgaaagtgctataaagtcatccaaagggaggtatccataagattcttagaaatttaagtctggagcttaagagaaaggtctaggccagacctctagatttgaagatcaattgtcaaaatatttaaagtgcccaagagggtggttatgacatgagaaaagaagaaataccgggaagaacaaacattagggaactcttacacttaagagataacataaggaaaatctgaaggcagtagacaaaggttatcaaaaagaatgtgggaaataaaaggatgcaatattatggaaaccaaggagaccttgtattaatgcgctcaggttgtcaaaacaaaataccaccaactgagctgctgaaataaaagatgtgtattttctcacagttccggaggctgaaaatcaagatcaggatgccaacatggtttgtttctggtgaaggctttcccattgagtcacagacagccaccatcttgctgtgtgctcacatgacttcttctttgggagatagaggatatagatagcaatgatagagacagcgagacagctctgttgtgtttttttgtttgtttgtttgtttgttttttacatgggcactaatcccatcctaggagccccatccttatgacttcatctaaacctaattacccaaagtctccatctccaaaacattctctattagggcttcaatagatgaattttggggagaatgactcatatattcagtcaataacagaatgtttcaataagatagaacttgaggtcttatccttggaatcaccaaggatggggactgtatggttaaccttgagaggtttcagtgctataatctgggtagaagttatactgcaataagttgaggagtttggcattaaaagaagtaggaaattccgacagtatttaaggaggttgaagaagagggaggaagggtatcatagaggagaactttaagcttctttgtaatatctgagaaaagaggtgacaaagaaggaaaagttggaaacataagagagagatcatctggtgtgtgccgggaggcctggccgagagctaggctgttagcagagccatctgacattaatggagaactatgacaatgaagcaccaactctgaggatgtttgtgggtgacactggttctcactcacctgtgttgatgtgtaatggttggtattaacatagtatgaaaaatcaggctgggaacttatcatcatttttattaaaatttgaaaataaaccccatcctactgattttattgggcctctggacttataaacattgacagtaagatttgagaagggacaaatgagggaaagcctggaaaggaaggtgtgttcttctggaattactgatgggctggagcactctcagcctgtaagtaggtgccctttgtagaagaaagaagggtaggctgggcatggtagctcacgcctatagtcctagcattttgggaggctgaggtgggtgaatcacctgaggtcaggagttcaagaccagcctggacaacatggcaaatctctgtctctactaaacatgcaaaaataaaattagccaggcgtggtggcatgcacctgtaatcccagctacttgggaggctgaggcaggagaatagcttgaacctaggaggcgaaggttgcagtgagccaagatcacaccactgcactccagcctgggcaacaagagcaaaactccatctccaaaacaacaacaaacaacaacaacaaaaagaataaaggagaaggagaagaagaagaaagaagggtattgtgtatccagagttagactcagttggggatacagcatgcacatctgttctgtgtgattggaaagagttagaaatccttagacccatccctgacgggtcatagtgcctaggtggccagcgcaaggatatttcgtttgaggtaaagtcctgtgctcctcaaaaaatcaggccagaatgttctcacttcctgaaagatgccacactttttcttcacatgaaggcccttagaatactttagaacgaacgtagcttagtaagtaaatggtgtgtggaggacaatgctgctgcaggagaccacctggaaagccacatgctcaagtgcaaggaaggggcgaatggccccaggataatggagatgcacattccctgtccccagcctggtgcagcaaatttgcagtcaccaccatttccttgatttttctcttgcaaataacacacttgctccacaaataacacagaaatagctacttttaatacttttaatacttatggctcatattttcaagttctcacctgagacagaccatgggcacctattatgctatatcttcaaagagaacataattccttttaaatataggtcatcttttatatttcagattcagataaacttgtatagtcaatgcatattcaagttctgaaacttaatattttattctcatatgttaatgtgtagtttctaaactgaatccataaatattcccagataattatgtgtaatggcccaaggtgggtacattcataacaccatcatgcaaataaagaatctgaggcttggaaagctcaatgccatttttataagaggagtaaatggggccaaaaatcattgttttctggataaaaatcacttatttttatcattcagtggctctctaagtttgttacctcaataatgtatttattattcacgcattaaattcaattaataagagatagagcccattcccaaaaaattcatggtataacacgtggttacaatctcattgtgtgcatgaaatgataagaaacagtataatgtggtgactcatgtgaatgggaaatttcagagtcagatgttgtttttagtcagtttgaactgctataactaaaatatcatagactgggtgacttaagagcagaaatatattgctcacagttctggaggctgagaagtcctagattagggtgctagcaggtgaggtcctagtgagggtcctcttctggtttgaagatggccatcttctcattgtatcctcacatgatagagagcagaggagggaggaagcaagctctctcctgtatcttcattagggcactgattccttcatgagggcaccaccctcctgatctaattatcttccaaaggccctacctcttcatactctcacattgggagattttaacatatgagttttggaaaacacaaacattcagctcatagcagatgtctatcgagtcatctgttttctttcaaattactagtccttgggcaaattgcttaacttctatgtgtttcagttataaaaatggataataatagtgcttatctcatagggttctgaggaggataaaatgagaaaatttgtataaagagcacagcacaatacctaaataattgagaaaaatctcaataattgttagcccgtgacattaaaattataaaaacatgggaaggtatatgaaagttcttatactatactaacataaaattcgtaattaccccttcaagtaaagagagttctagaaactggggatatgccttagccttatgcattcattatattcgtgctataaaaaatagaggagctgtaagtctgctggaagtggaggcatgctactgttactccgtgtgagatgtgtgaagaaggacaccctgtatgacacggtttggcaacctgtccctgcttggcctcagctaaagaaagatgaggtcatttgcatcccatctgctagccttagtgtccagtgtaaagtgttatcaacttaaaagtgaagcagactgtgtgaacgtgttgtaaagctagtccaggagcaaaagtattgagagtttggagaatgaagaaaataagagaaaagtctcagtgggtttggaagcttcagatcacaagaatagagcctaaagggtcattaattagaatactttggctgcaagttatagacgacaacttaagctagcctaagcaaatggggtggggtatttaatgtaaaaatataagaaataatatcaggtatctcatatgacatagaagactgggtccagagtggaaaggctccaggtttctgtcttcttgcctcctgtctcgccctatgccttcttcatcttctcctcagatatctttatttcgtgagcacgcatggtgagtctaaggataaccatgccaatgctcatgagttcacatgttattataggtccagatacccaaagagaatgactgaattccctcaacccacagggttctgcatagcacagagagaaatactgtccatggagggggaagaaaactccatggctctgttagaggatccatttgttatgaaagtttgaggtgtagagtcaactaagtttaaaagccagaccttatcttcacttctattatatagatttctggctataaaatgcctctccattgcctcgggatgaagactaagaaaagacgaacattaagttttgtttttgttttgttttgttttgttttgctttgctttgtcttataaagaaaatagatcattaggacattgtcttctgagttaataaaaatacattttaagttacaggacaacaataaaatattattaacattagttaatagaataaaaaaagaaaatcagtgagtatttaatcaagttaacaaaaaatgtacctataataacattttatttcaacagagtaagggaagccttctataactgaaggcaacttaatactagcctctatgcaaattatctgtaagatatatgaggaattggctgctaacaaaattaggctgagcccctaggtgatgctgctccaggtaatgaaaaacaactctttgaaagaaatcaataacagtaggaaatactttccttccccaaattttccagttataaaaatatattctcaagttaccatgctcctagcaaataccctcaaatactgtgggaattaatatctttttccacttgatcaaacttcatatttctcatattatttggcttagatgggtatgaaaaaatatagacttatgtaataaaagtacattaaaagaaattatgatagtggagttggagtagggatgagggagaacagggatgctgtcagccagttctgtgactgtagctgttgattccattagtgtcttactgcaaacttgaagtaaggtttttataattcagtccttaatttaaaaaaaatacagagtcgactattttgcaaactgtggacaatttattggtaaagaaaatagcacagtctgtgatctttgctttgtcttataaagaaaatagatcattaggacattgtcttctgagttaataaaaatacattataagttacaggacaacaataaaatatgattgttaacattagttaatagaataaaaaaagaaaatcagtgagtatttaatcaagtttgagtgtaggggagtagaggaataccagcaagaaacctggccacaacaatgtgacaaagtgaagttctacaacagaggaggtagggaatgtttgggaggcacctagagggcctctagtaaaggccttggaggtagggaaggtctacgaagctctatggacaatagttcccattagctagaccaagaaggagattaagaaagagggggttaaggtggaggaagtgcagagagcgtattctaggcagagggaccacgatgtaaagagatttggaggcaaacaagacctcagcttattaggaaaatgaagaaaaaaataaaaggtttcagtagggttggtattccttataaggaatgtttgtttagcttcaagtatgtgaagccaaaagttatttcagggctaatcctagtataaaatcacttttgctaggatggttagaattataggcttggtttcaagggctgaaacatacctcttaagatccagaagataaatactgttgactcattcattcaataaacaactttcaagcacctaattgtgtcaggcactgggacaactgcagtggtgaacaaatagatctggctcctgactttgtggaaactgaaatctagctagtagactgggcattgaacaagacaatacaagcatagtgagtgtttctatgagaagtacgggtgttatgggagtgttattagaagtctccaaccagtccaagaatgctggaaatatttccaggaagcattaccctagctaagatttctgaagaaggagaagcagttggttaggaaaggaagaaggctgatggattagagcagtcagggaatctggatgtaaagacgggaaaaaaagcactcacagatgatggaaatgaagcaattccaggatgcctggagcagaggaagtaagaaggaaaacagtgagacaagactggacaggcctctagggccagattacttagaactagttagaggaagccttatgagcttggaccttatcttctggacaatgagaatccactcaggtcacagagcagtgtgcactgtgattggtgagatgtgtgtttcagaactatcactgtacccccagtatgcaggatgtttaggagacgagcaagatatgagcctgagctccaggaggagactggtacagggtccagggaagagattacagtggcctgacctgtggctttgacaggtgggacgaagacagtgaacaaagagaaatacttaagtaagaacaaaagtaaaagtaaagttgctcaaaaaattcaatgttaagatatacacagagccaacagagacatgcctttgcctcaggattgttgggctacaagacctataaaagttgaactatcaccagaataaatgtataaacatactaaaacatgactgatctggaaaaggaggagagcagagaaaagcagtcacccaagaaaacattggaaatggccacagatctctgtaaggtggaggtgggtgaagggcttggtgaccaatgggttcattacaaatttaagatgaacctaactgtcttcatttgatgccatcaaatgtttaactattgaaccttgtaaccctccatcccctccttctgcctccctgtgaacaagcaatggtcaagtcttgtctccccttacaagtctattgatatatgttgcagcattgtcaacgctgtatgttatttccattgcaaatgaaagtggaatgaattctggcatgtgacaatcttacttcatgaactgtttaatataagccttatcctagctgacatatcgttctttcaggggcagacaaaaataagccctgcatttaggattgacctgagaggtgagtagtgggaaagacaacagcaagaccgagagccagatcctggctggcccttggaaaacccttcattaggaatgtgcagtctttggggttcatagcagctcaccatgtttttcacatttttttttgtagagttcagttcatttacagtagagatgacaatacccacattctgcttatcacactacccatgaacatactacattcatatggcatcatactgttctaagatattgaattatgtagtaagtagattttaagaatcagctcaaagtttgtttcccaaagcctaccttattatacctgtgctcagcttttctgacagaaattcatagatggctcatgtgttaacatgtactacatctatatttcatttctcccacaggaagaatcctaactcccaagaaaacagatgagagagtcagaatatctcataagtatatatttttattattccatgatagtcatacaaatgtcctagaataactactaatactaccactaccaactcattactgagaagagttaaaacaaatttcatactaccttcccatctcctccttttaaaatagttttactatatctacattatctgagtacaataccatctttcttttaacttttatttcatcttagttctataattaaggatatgtttaacacttacctcctgttcctatgatgatggctccctagttatttcactagtctgaagcttataatcttgttctagagtagatttctcaggaaaagttcatgggactaaaacttagattttgcttattgaaaacattttgtctacaatctttatctcaaaagccaattttgctggatataattcagggtgcacattttatttttctgaagtgttttcaatatgttgttccagttacctttagtataaaagctttgctgcccccaaatctgataataatcttttttcccttataaaacccttactgatttttcctggacatccaaaatatatttttctttttctataaagtctagtgattttactagaacaattattggtattgattgtattaggtcaatattcttagaaatgtaatgctctcttttaacatggatttacatttttttaattttaggaaagttttcttgaattacagtcttcagcatttctttccttgctttagttttctttgtcaagaattcctagtatctatatattaaatcatcttttacacattttctgtaatcctttttattctctcatttcatgtacatgctattgaagtataattatatacaataatatgcattgatattaatgacagtttgatatattctacaaatgtgtaatacactcatgaaaccaacatacaaccaaaacctaggacattgccctcactctagaaagtttcctagtgtccctttttaaactatcctgctctccaattagagacaaccattattctgatttcttgccccatatattaatcttgcctgttcttgaacttaataaaaatgaaatcataaggtagatattattatgtctctattctttcacacaacatgagattcatccatgttcttgcatgtaacaagagcttattccctttaattgctgagtaatgttccattgcatgaatacacaatgtttattcttctggtgatgaacatatgggttgtttctaactctcactatgacaaataaaggtacaatcaacatacatacacaagattttattaacatatattttcacttagtgtggttatatgcttaggaatgaaattgctgcatgataaggcaggtgcatgtttaacttataagaaattgccaaacaaatttacacaatacttttgtcattctgcctcctaccaagaatgtatgagacgcatttggtgttgatagtcttttaaattttagccactctaatgcgtatgtagaggtatttaattatagtttccatttgcattttcctgatgactaatgatcttgagagtctttttatgtgtttattggccatctatataccatctttttgtgaaatatctatccaaattctttcttcttttattgggccgtttgccttttattattattattattattattattatttttgttgttgttgttgagatggagtctcacactgtcgtccacgctggagtggagtggcacgatctcggcgcactgcaagctccgcctccgggttcacgccattctcctgcctcagcctcccaagtagctgggactacaggcgcccgccaccacgcctggctaattttttgtatttttagtagagacggggtttcaccctgttagccagaatggtcttgatctcctgaccttgtgatccgcccgcctcggcctcccgaagtgctggcattacaggtgtgagccaccacacctggcctgccttttattattaatcgtataatctggatttgaattctttgtcagatttatttattgcaaatattttttctcagtctttgacttttcatttcttattggtattttctgatgaatgaaagtttttaattttgatgaagtccaattgataaattttccttttacagttagtgcatagttcagtgcagaaaccttgcctattcccagatcatagagatattctcctgtgttttttctaggaggtttattgttttgacttttacatttattactgtaatgcattattactgtattgcattattactgtactacatcttgtaatacataagcaacatgtcttagtttgtgtggctataacaaagccatccatagactgggtggcttatataccatagaagtttattttttacagttctggaacatgaagtctgagaatagggtagcagcatgggcaggttctggtgagggccctcttccaccatgcagactgttgtattctttttgtatcttcacctggcagagacattggaaaactccctggggtctctttcataaaggtagtaatctcacttctgaagcctctaccctcatgacctaattgcctcccaagtgccccacttcctaatatcatcacactgggagttaggatttcaatgcataaatttggaggaggcacattcagttcataatagaatggatcgaggtttttgtttttgtttttttctaaatatacattcagttcacccagataaatttttgaaaatattgccttccctcattaaatgactggtacttttgtcaacatcaactgaacatacgtttagtcctgattatgaaccctctctattctgttctatccatgtattcatctatctttttgcaaataccacactgacctgattactgaaactttagtctgaaaatcaggtagtgtaagtccttcaacttcgttcttattttccatgattgttttggccattccaggtttagaatatcattttcattattcaaaagttcatcgttatgtttgatgctatctctaggttttgcagagatgcccattaatagggttgaagatattcccttatactcttaagtttgctgagaaattgatcacaaataagcattgaattttgtcagattcttctgtatcagttgaaatgattatatttttctatgttactgggaaaatatattgaattatcaaatattaatcaaaccctgaatttctaatataagctctcctttgtcctctatatagactactagaaacagggtctactttgtctgacattagtataactactagcttttatttttgtttggtacttgcatgatataccattttccatcctttgattttcagctttctaacctttgactttcaccttttgtgtttatatgtttaaggattgtgtcttatatgtgcagcatgtaagtttgattttgcttttcagtcagtctgataatgtttacctttaaattagaatatctagtttatttatatgtaatataaatgctgacataattatatcaaccacttaattattttctatttgtctcactggatttatgttccattttattttttttccttcttttgattagtctaatatttatcaaaataataatcactagtattttaatattcaactttctcctgtattagtttgttagctctacattcttttattattttttatggttatcatagaaattacaaaaaaaattaatcttttatagtctcaaataaattagtagttttatcactttccaagcaaggcaaggatcatgaaacacttaaatttatcttgcatcactgttgtgcttttttcacatgcatttcatttctatacatattttacatcctatcttatattattattaatgtgattgatttgcataatcaatatctatgtatccccatatgtttctcctttacgttataatccagttacggactgagctgatttgatgtggactgtggttttataaaacttgttctgcttcacctggtgcatcctgttctgagggtagagctatccgggggtcctggctgagattctgggttccgatggtgtacttgaacctctaatcctttgaaagtcttgactccaattttgattcctcagcaccgtgagacttccagaaactttactctgattttcagcagcttactgcttagttttgtaccctgtgccttgtgtagcctaaaatgtgataaatatgaaaatttttctagagggaaaccaccaagtgtcagtctcacttttctttacttccctctctccaggatctcggttcctcaagttctagctgccttggagcacttgaattcaaaattttatgtctacagtcctgtgaatgtatcaaaaattttccttgcttctttgcctcttagttaagactctctgcctggattcttagtctgttgtcctgtatcaagaatcatcaaaaattccaaggggaaaaacagcttgaagatgatccgcttacctctctgaagtcctgttccttctaatttgttgatccgttgcattctggtgctgtgacagcttctcaatatcttccagtggtttaaaaaaatttatctggtttttcttgttgttttcagtgggagagttagtttgccctggggtactacatattagctgaaagcagaagtcttcttatgccaatcttgatccctcccttttatattatatctaccacttaacactattggaggatgttagaaaaccaatacctttctcaataggctgtgatgtggctatgatgttctttaggactatggtgattacacttgtaatactatgagagaaattgtatgataattgcttattcagttctgtttcaggttccatgtgtgatgacatgaagctattaacgcctctgcttcaagagaaatactagtgtaaaataaacgttagtggaagtaggcatctaatattgaggttagtgctatagccaagaatttcagaattctcacaaaatttaggtttttgtgttataagtcctttataattatcattacatcttcagttctaagcctcttactaaataattatttcttcttttcaaaacatcctgaggtgaaaattttaacttttggcaagttgttttcatcatccttttctcttcccctctgtaataaatcaaagtaaggtaataaaaagtctgactttggaagtttgtcatctaaagtctctctggaagcacagcaggctattttcccttttgtgtaacttgatctaccttttttttcctcctaattttgagcggctgctttctcattagaaaagatgcctatatgtgagaacaaacacttaaaatgtatgtacagttaaataatgtatttacaacatgaaaagtactaactgtactctactgtggagttctgaagtaagaaaagcttcagtagtaattaacttaaaaatattagtactgtgccaaattctgtcatttacatttggcgtgtctccttagtagctgttcatatcttttaatatacagttttagaatgtttacattatatctttttttaagtgaaagaaaatatgtatgcagccccatatagtatcttagttcctggggtaaagctaagaggaaaaagaatcatggtctgaattattaggtcatgataaatttatttttataatagaagttattgcttatttttatattaaaaataataaatatttacagtgtgcaatttggaatatattgggaagcacaaggaagctaatattaattacttccaattatacctagaaagaaaaatcaccactgatatttttatgtatatcctcattttaacacacacgtatacatacatgcatatacatacacactatttttactatttttttaatttaaattttcctggggatattatgacattcaatattaaattttataattaatttaagaatttataataaaaataattgcttttgctatcccttcaattagcaaagtaatagagaagctcaaaattatttcttgctaatattcatacttggaatatttccatattctgttttgatttattcagtcattcatttaacactcataataagtagagtggccatatgtctttgtacctacccaggcagtcccaatttatcccttttttatggcttaattataaagaaaacttctttcacgcttaaaagtaatgttcgcatgagaaattctatggttttcttaattatttgaaaaaattggggcatatgaaagcagaataatgtggcacataaggtaattctgacatgaattatgtcagtctttagagactatggcctatgggagattagaattaacattaataacatataaggagtaaaaaggatcacaggagaggtactgagatttcgcctacattgcaatgtgaattgtacaggaacttgacaaacatgttggaattgtgaaggaaacatatgcaagattccacgaaggctaaggatcctttagggaacctaaacattatcaaagaaacagacggaagaaaaatattaagatatcattttacaatccttggtttggcaaaaattaagaaataaagaattctgatgagacttttgttttggatagcatgaaagagactgtggcggaatagctcccaagaagaataattggaaaaacaataggaaggacaaagataatttatttacagcatcagggagctactgaaatgatgaagattaatgagactcaaatttcagagagaagagaaatgaaaactgagacaattatctgcaacagtgtttccacgggacaagcactaatagtgcaaatttgccagttcagggcactatatggaggctgagtgtatttgttcattctcacactgctatatggaactacctgagactaggtaatttatgaagaaaagaggtctaattgacccacagttccacaggcttaacaggaatcacgactgggaggcctcaggaaacttacaaacatggcagaaggcgaagggaaagcaaacacgtcttaccatggcagagcaggaaagcaagtgagtgaagggggaagtgccacacaccttcaaacaaccagatctcctgagagcacactcactatcacaagaacagcaagggggaagggggaagcctgcttccgtgatgcaatcacctcccacgagaccccttctctgacatgctgggattacaatttgagatgggatttgggtgggacagagagccaaaccatattcctgagtttccaggcttgggcttggcagagaatcaatggaaggaccagaggaaacaggaaatcttttggtcacaaaggactggggtgaggaaatgaaaggccagagaggcttcaccacaggtccagcttctccctcaacacatttgctgatgtctgccattgggtgggtcagaaagattaaaagataagctgaatacatctgacatacaaaataggtttccatggagttctccagtgctgagagacagactcatcgaggagagggctcaaaaacacttttgtaatcatgtgaagctaaaatgacaaaattgaagactcaaagtcattcaaacacatgatcaaggctccctgacaagatattttcctaattttgaagctatctgcagcagaagaccaaaaatctaaatagaaaaatctttaaaaagcagggaacgtaaagaaagacccaccagatgaagtgcactagtgcacagccaggctttctgttgaaagtcccgaagggatatgccctgtggtagactgatttttatcaaaatgactgtgactcagctcagtcagtggttggattacgttaagcagtgcccctctacttaggagaggaaatggtaaggcaagatagcactttctagggcctctacataatcttattttatatgttcacagtgtctcatctgatataaaatactattaggcataccaagagataggaccatattactggaaaacctagggaaacagacaatagaagcagacccccatgtgatacactattggagaatgttagaaaaccaagtcagtattcttaacattggtaaataaaggaaaagaatcatctatttgccttgcattttctgtttgaactctatctcagagaaactaaatagatgatgagggaaagttctttgttagaagggaaatacagttgacagatacaaaaaggatgatagaattgcattaccactttgtagtctcataataaaataatttatctatactctgataattaatggctgctaagaccaccagaggaaagactgatgggatgttttacaaagtattcatcaggataacaacatctgatatctttgaaaattgccataataaaaagttaattttaaaaatgtctaaaaaccaagcagaatgtctaaaaacctcatacactagtgtaaattgtgcaagaactttgcaaagcaatttggtaatatataagaaagatgaatgtgcatgctcaacaatgtaccaattctagttctaagtaaatatcatgggaaaaaaatctcccattaacaatgtttattgcagtattgataaaatagcaaaatgtaggaaaaaaactaaatggtcatcagtagaagaatggattattttttaaagtgtggtatttgttcaatttagtttaagtgaatgaactagagttatactctagctatacataatactagttatacataataccgtgcaaaaagggaaattgttgaatggaaatgtaatgtcaagtatataaaatataatatgctaaacactatcatgtattatttactaacacatatgaatatacatattcaacataaaatatgccaagtgacaatacataccaatttgtctctttaaaaggagcagattcatatttagaataatatacagagggcttcaaacatatccttaatattttcaaaagaaagaagattttaatagggcaaaatgttaatatttgtcaaatctatggtggtaactaaactgaatgtgattaaaccattctctgtagtctcttactagcttatgaatcttaataattaacaattttgaaatgaagcaatattttacacctatatggaaagactgcattgtgcatatatataaagagttttaatatacatgcatgcgttaaaaggaagggtggaaaaaatttccatttacagagagcctacacacatacccagagctccattctccattcctataaacaaatgctgaaaaacaaacattaaaattcaaaaaacaggcaaaaatgcatttggctttggaaagcaatcagaggcacaaattatgtatttatctataaaaacaacataaaatagactgtaccctgctaaaatggtcttgagtggtggctgtcattctttatgattactttggacagctgctgcattattatttccatggtgagctttctatatttttaagactgaccatctggaattgtatagaacattttatctctgctaaaaagtagattaacctccaaacctccgaaaacatgcaacttcatagacagctaacctgactgtgtgcctcacctgttcctgacaaatccattcaaagtcactgttacccaaataaaaaagtctggaagagagagaaaataaagtttaatttattttctactggaagttattgacattcttgagtaaggaaagtggctgaagtcaacaagtaaagtgaagggaagtttgagatcctatgaaataagtctaagctaaatacacactgatattttaaatgtctgagtcttttgtctgtgtctttatttttccatccttcaaaataagggtattaatagcaatggcttatggattaggctggaatagcattttgctatttgaaagcattttcacacatactttttcaacaatccttctttatggatgaaaaaattgagtctgaaagaagtgatcatacaattggaaagtgccaggcctcctgattcaatgtccagagatctcattgctaacatcatactgagtaaaatttatttgtaacaaattctaacttcatttaaaaaataaatctttacatagaaagtgaagaatgggtgacctgatgtaaataaaatattaaagcaaagtcatactgagttaagtatctctcaaagagagataggctgttatatcaaggaagactatttggacaatggaaatatatgggtaaagttacgcagaatccatcagtgtatgacaagcagtgactttacaaaaggaagaaaggaaaggaaaaaggaatgggaagaggaggagaggagagggaaatggaggagagggaaagggagaggagggagggagggaaagaaaggaaggaaggagggaaagaagaaggaaggagagaagggaaaagaagagagagagacctttgcactttaagaagaaattgaagaggaccctttctaactaaactacttctggggtttctttaaatccacaacttctgccaaaagattcaagcacagatttgggacttatatttgacaagcccccatatgctacattttccctccaagcttttactctggcttgctgaatctgtggttggttgaatatgtggttttacaattgctaaaaataccctgaagtcaacctctttctctcagtttttatgcagttgataaaatggccactctggcctcagattttacatggcttgtcctgtaacctttaataaaacactcctttcataaaagcaaggtctgtatgcagggtcatttatgtttcacttcaatgcaaagtgaaagtcggagaccaaacaaaagggatcataaaggagatgctctattttttttttttttcaaatctctccatcagtagttaattagggtgtctttgggattactgagttactgtgtgaagcttggctgtcaatatgccggaaggcctcaaaggaaccgcagaactgtcccctaactgcaggagtaggttttaagagggaatgcaagtcacagaggccacagagcttcctgtccaatttccgggagacacagaagtacagatgctgcctgggtgcaccacactgtgggactctgctaaggtcagtacaccgagttgctaagttgtcaaggcatccccccgccccttgtttttatcattagacatccccagcaggcaggaccagctgcattgtttgcagggcccagtgcaaaatgaaaacacggagctcctgattcaaaaagcagaggtaaagtgttaaaggtactacattataaagccacagcttctcttgatctgtcatggtgttttgtatttttcatttagtgctgtgttcccttgtgtggggcaaatgaagtcccaccagacacggccatccccattttgtgactgcacgtgctcagcccacaggctgccaggttcctctccagccagtcactgggcagaggtcatagggaagttgaaccggttacctctctttctcatgtcctctttgcctcagcccatattagacaggtgactcccaagggtattgcaataacagtgcagagacacctaaggtatctggataaaggatgtgcaagaggcttgccactgcgtgttgcctaccaaaagtgcagtggcacttccggtccagggaggagacagccactgccattcattgccttgagatagtacagggcacatatatcagaccctgatcttgtcgggacttatgcccaaccccttgtcaatggtggaaagtggtagtgatttctagacaggggcaggtagtgggaggctggacagggctgggacccaggggacaagagtccgaaaatcccaaagcctgtccagaaaggcagggaggctgcaagatgtgggccatgtgtaaactgaggctccaatctcccagcgcatgctctatttccccattgaccatcacttgcaaaacacaaattaaaagataacatttttatgaatttcaagaggatgattacagagcactaaacatcaagtgcagggctcttcggaggtagagattgtgtttgtctgtctgtctgttctggttccaggcccgtgaagctggtcctgccagggccccagttcccagtgccaattgaacaggccacatacagacattcctcaaaagtagagttaattagaggctcaagaacatgcaaacaaggcaaagcctaatgctttgagtgtattttctatcttctttcatgagaaataaagttgcttgaatatcattttacatattacttcccactacatttacatattcagacatacctttattcctgatcatctccttgctaacatttacattgttttaatgatcttttgatttcgagtaggcatcttgaatgtcaggggcatattaccttgataagtttgatagcaaacagtgtctgtttttctaattttattaaatgaatggattattgcagtaataatgaagttacaccaaggtgtctcaaattcttatcttttgatgaggatttcaaattactctcggtaaatcatgcacctttaaatgatttcatgaatggtccaaacttgatggaattgtacatatggattaactttgttttttctctgttacattcaatgtgctatggaaaatcttttcctgccttatacattcagttcaaatcccttgctttcaggtagtgaacatctgttccagagtattcttgtttaaaatttaaaactcacagctcttcttcccagcacctgtcaggcctcagcctgagagacttggaatgggaaggggcatggtctcctcctgcaatacctcttcctcctctttcttctgagttttcactcgtctgtctactttgatgggaaaaagagatagaagagaaggaaaaggtctttgatttgccaggagccattttggtcctcttccaggttaccctggacagttgtcaccaggatcttctgggtagagggtcagatgttgactcatagagaacattgatgagtttgaggagccctgtagagaactgcatcatggccagagtcccctgacatgagagatttctccccagttgaaccagcttcacccataccacctgtagcatgtgctgatagttcaccctaagcatcttgtacctgaaattcttttctatgacaggcagcccgcttatgtggcatgacagccagacagctttatcccatcaccttctgcagtgctagctgactcatgggaaatgcacttatccttattccaacaaatgatggaaaggccgactacccctggctgcccatcagccttgtcatgtctagctagttctcttctccatctgccaaaggggcacagaagccagactatcctaggtgctgtataaggagacatccagctagggaatgagatgatattcttcctgtgtgcagattcttccaatctcaacaggtgggtctgttgctgctccctctctctctaccactggacactttctgtcttgtgaatgccaagagataaatatatgaagtgacagcaatgcattcattatgccataatatgcaggaaaattaacagtgcaattaaaagtcacagtgtcagacataaactcatgcacttcctttaggagtagagggtgggaagaatcagcctacatcagtgtaagtagagatgaagtccactgccacaagggataaagaagtgtgtcaacagtggagggaaagagcaaacctggggtagacacacacacacacacacagcaaaaaaagcatctgccacttggaaagagatgcaccccactgacagggttttaagaaatagcctggcaatgagaaacagccaggcagagcaaggaccatagagcaaacggaggtggaggcaatacagagcaaggctcagggccaggcactgcctgagtggtggacttgccatatctgtacacatgtataaccccctcgctcactgggtgtctttttcttttcaatcttcaggaagaggcagccagaattctcgcccaccagccaatgtccgtcggcacatgtgcagctttgaaaacccccacactgcagtgaatgtgtaagagaagctgcatggaaaatctagtgttttgccccttgctttctctctcctgggtttttccactttctaacatggaaacagatgtggtgcatgccatcagaatgaagaattcatttacgtgccatggtttgcacgactgccttaaattgattgtccatcgttcttaaaaggacactgtcaagttgttcatttaggctttttgcttttttatgttttgatgcactattttttttttctgattctggagactcacttttgtttgtgactcccactcacaagcccgaaagtgaattttcccccttcagaaatttgtcagcttctccttggcaaacagagctctttcttttcttttctttttttgcctttttgcggttgcacaaatgtttgaaatgatgctgtctgcactaaagtaaaagccatagcttgaatttatggaagagttctatcatgtcagtttgcgggggtgggtgccaacatgagcctctgctgggtgcctcccacaccctggggagcacaaaacaaaagttttgtgagtcccacaaaaagtacactttacaaaaaggaaaagtagtcattttcctaacattatgagtgatttttatcagatttcctcgtctgataaaaatgatgcatgtttggtcccatttttgacctttagctcttgacagtgtctttttaagttaacaaaagaacatagaccatgttcagttcgttgtgcacggagtctgtggtcattttcagctgttcctttacagcccttcaaactccttggagagtcaaaggtacacattcctgcagcaggagggagcccactgatgaggtgtctgtggcttgaatagctcttcagatgagaagagcccaatttgttcaaatgtctgctactgaacctggccatggaggctgatgaatagggccataacatctcttcccttcactcagtggagtgcaatgggaagtctgttgtctgcctttctgctattcctcatacaaacccaaatagaaagagtgtggtctccaccaaatcatattgattcttagaagaacaaatatggtagtcctgctggtgttccaggtagtaactgagaggtgtctgcgcatctaggtcagagccactctactgtggctggatgaattctctgtaattctcccaagctcagaaggcactgagtgtttcttgtatcatggggtgagtctaaccaaggacacagcaaggagattctaattgtgagagctgctggctgcctgtcaaaaaggattgatgggaatgggtagatgtgcttgtcttgtcctgacagcagggccagagagagaggagagttgactgacattttgtaactaaaaggtgagtgcctaaaagcaaaagtaaaagctgaatgtggtacatccctggtgggtgacaaaaaataaagtaacagtcagcaaagctaacagattggccgttaagaactttcagaataggatctattcaaactttccttcttcagaccataaaggattaggaagagataagtaggtttaaatctgtgcaccatacactaaactaagactggatatttttagccatggttgttcctgttaaatttttttttaaagatatgttcttctgtgaccttcagttcccactgtttttgtgaataggcaaggcaaagagattagtgatgacggaaataaagctgcctactggaccattatggtctgtctagatctatcctactcctgagaaataatcccaacagagcaatgcaactgtaatttttattgcaattagaaaattggtgaattttccagttgcaggaaatatggcagttgcatttctttgttgggaaattggcaaattagaaaatttaccagttttcccatttctcagggtgaattatgagaactccaggtagagctgaggagcataaaaatctcttactattaagagattgtttctggtagcacaaagtatagaagaaataataatgtttgacctgaagttcctttaaagggagcgtaatttaagttcatctatacttcctgaagaaatataatcatatttgttatacctctgctaaagcaacgccatggtaccaacatgttgtcttaaatagactttggtaggagaatttcttagatcagccagtaatcatgattaggttgaactaaagaccattcaaactgtacttggaaaaattttagtatccatcagaattctattctttaatatgaaataaattgggtaatgttctcaggagagtggagcctctacccagacaaactttatggtgccttctatactttactgaatttgattaggtaattttatttctgaatgtctttttctttattgatcagatgaagaaagcacaggtcttaataagggcaaactgattttctttgtattgtcttttatctagtgtcatataacttgaggatgtaggatgtaattgatctaaagatcctaaaagaagaactgcatacttagactttgtgatattctctaattttagcaagccaatgactctctgactagcttatgatgaaggtagaattaaaggggaaaaggctaagattcacaatgccatttaagatgtcatatcaacagaaactaccaagttctcatataattagaaagcatttgtcttaaaaaacacctcagaaattctttaccttacagctagtggtgagtcaaaaaggcgagaaattgtaattatgttcagataggcccccaagtttgagaatacattctaaatatgcagatttttctggaaggctttcaagaagtggagctggagtcagtgggagtcctttgtattgatgacaaactcgaggttgcctgggaaaacagaagtctgatacaactggtgtcaaatagttcctaggcctgagattctacaagacctacttctcaagctgcactagggtaccagagggctgacgaatgtgaagttgaaatatctggacagctgtatttccagcattcctttgggaaagtcttggtggggtcagaacctccccttccttgacaggcctcatgttctagctgtagctgcgggagccagagcagaactgtcccgaagtctgtgcctttttatcttttttcttggtgagccaattccctccttgctgggactcaatggtgttttccgtttccattttcactttcagagaaaacaaatgctaccctcctcaggttcccaggagtgagcctctctttcttacgcgaaggtcttgcattatctgtgggctttctggatactgtccttgtatctgttgtgaagctattaagcctagaggcaaagacttgatttggacataagagagacaggtgttgtgtaagcttccccttcaggcagtttgtgcaggaggcttccctcctgatgatctcaaacacccacccactgttattcccattttaaacctctctggatcagagaacagtgtactctgcagatgtaactagtacttactgaaacaaataaaacagacaggatcactgaatgccaaagatacactaatctatttacaccacccactctcaactattctctaaagtgccgtaaatattgggttttctgtttgggggattgcgatagctaactaatgaaagaaaaaccaaagcaagatcccgaacctgttgttgctggaactgcaacctcaggcctgcctagctgtccacacagtaactatacattatcctatacatcctgtaggcctaacagtgttttcctccaattgagccacctgagatatttactctaaatgcctctgcatttgatcttcaaatataagattgatttaggcctcaggtctgtcttttgaagtcggagcaaaaggttcaggtgctttgtaacaattatgtggtgttttctaaaccagattgcttttcctaagattaggaagccaaataaaattaaacaatagaaggaagaagctggtggcagaagcagaaacgattaaagttatctgggattaaataaatgtcatattgcaggataatattgcatttttataatgtatttattctttcttgatataaatggatttgattttacatatttttctcttcttaatatcacagtagtgggttccctgccttctcaaataagatactctcttttctcaccaaaacagttcttaagccttcacctgaatctattattactaaatatacctctcttcacggccatttgaatacagaacaaaacaaaagcttcccagaatttagttacacatgtattgaataacactctttatcataacagcatctacatacatttaaaaacagcagtgcattgtctacaaatacataatatttattcagtttaaaaacaatgcttaatgcaggtatagatgcatggacctttcagattatctatggaccacaggtaagaaatgactcatcttgaagaactaaagtttgtactcagtgctgcaatgtctgtgagatgatacattccttctactatgtttgatttttaaaaagcagtttattttatccttgaaaaaagattacactaattttcttaatctgataaatgccctgaggtgtgagatctgtttcctaattaaaagtactttacagcaaatctagagcaagactgaggggaacgaaagttaccagttttgaaggccatagtgaaaatgtcccatctcaacaataaaaattggatttaattaaaacagaactaaattctgattatatctgtctgcaacatgattaataatactgttaacttatgggtgcttttgatttaaaaagaggcccacatagaacctgtggacaatgaggaaaacagcccatgtgaatgagtgggtgaagtggatcacattagggctttcaggaaacaaggtacctttttgctattatgtgtagaaactaaggcaatgtgtcattggaacagctaagcctgctggttgaattagaggcagattatttctcaagggacctgtttgttgttgttgttgttgttgttttaacacacacacacacacaactaaatagatacaggataacattttgtttaagcattttcctggtgaacattaaaaaggcatttcctaatgcctatgaagaagtgggaagatggggaaggaaacatttttttcattgcaatttaaaatgatgcaaattattgagttggatgctatatatagtaaggcatacttaaggagggtaagaggcaaataagttttatatttgcctttctagaagaggcatattgaatgcataaaaaaaacaaagtgtgtatagtggtagatgatggggcagttgaaaaagattaagtggaagatgagtttacctacagttttaagctcagaagagcaactgtggattctggtggtgattctggctagctggttgactacctgttcttgccagggacaccactgacctgttctttagtttgtttacctcagaaaagagtcagctattccaacaagatagtgtggaagtcaataagacaatttttaaaaactttacaagcacttccacagtctcagataatgtgtaaggcatatatttgaaagaaatattaactttgacataacagagatgagctttgtcttagacaattaaaaatgcagtgtagggtatcagatatatggaggaactacctatttctcaaataatcaggtcaaaactttaactgttttatctattttagagcctttatatccagaattttctataatcaatatcagacatttacactcatctgtacttatctggctcactttacttttcaagattataaaatatgaaatgtcaaaatattaccttcatcataaatgatgctcacatataatttttgaagtattcgttcttgtattctcaagatgatgaaataaaccattatttaaactactgatcatttcctacattttttccaaacaaaaactagaatatggattagtctatttcacacctccacttaaagaaaaaaatgtccatttttatattccttttaatgtcataaatgtgttactattatgctactttctctgtcattttactgagtacagagaaaaagcaaacttctaaaaaaagaaaagaaacaattatttcctgatttaaggattccaccgttgttattagtagaaggctatggtaaggtaccaacatctgcttaaagttatacagaaaagaagctgagtccagaagtgagatcagagttattacaatagacagaacagaatttggggtgtaggccacagtacatcttcttattttcttattcagggagaaattccatatggctgcttttctgtgggtgccatgaagatgggagttgataaggctgggatgctcctggcaccctaagactcttcttcaccaaggctcaatgagtagaggttttcgtctcagtaactgctgctttgtctcaatcataattttctcttatttgcatcaaactatcctaaagcaggatgtgggcatttgtatttttcctggcttcctcattctattgcttttcaaatacagctatttcaatgttcctagagtgaaaatcccaaaccagcttctgtgagtcagggcctttgtgtgaattgtgatccactgtatgtgtgagaaataatgcattgaaatgttttaaaaaaatcaaaagctatgaagctcataaattgaccatgagtctgagtttttctgtcatctgcttttttatgttccttataggtaccctgtgtgatcacgccaccctggtcatgggaaatacttgcatatgagaatgggcaactgagaggatctattttataatcccacaacacaacgagagtagctttgtatgtgggtcctaatttgtcccaaggacaatagccattattttggttgtccatgtgtaactaagattttttttttaaagttttcctccatcagttgggagtttttcaaaagtgtgtgtgtgtgtgtgtgtgtgtgtgtgtgtgtcagagagagacagagggagagggagagagtgcaacggagaaaaaagagaggtttgtgaaatcttagacctaaatgaaaatagctatttctacaacagactggcttttctcctcaacaacttttctcagggtcaatatttccttcagcttttggtgttctttttgtaagaggaggtatggggtgctggagcaaaggcctacagcagagacagcagttaaatcacactgagctaggtttgcatatgttttctatgtattttatcctgtgtgcatgatctatctgcaaataaatccatctctattttattcatagttctaatggcaagtctgtgtcatggtctgaaccaggtggaggacaggtgcccaagggacagcatatgtggcaccgcctctctgtgcacgtgaagaccaatgagacggcctgcaaccaaacagccgtcatcaagcccctcactaaaagttaccaaggctctggcaagagcctgaccttttcagataccagcaccaagaccctttacaacgtagaggaggaggaggatgcccagccgattcgctttagcccgcctggtagcccttccatggtggtgcacaggcgcgtgccaagcgcggcgaccactccgcctctgccgtcccacctgaccgcagaggagacccccctcttcctggccgaaccagccctccccaagggcttgccccctcctctccagcagcagcagcaaccccctccacagcagaaatcgctgatggaccagctccagggagtggtcagcaacttcagtaccgcgatcccggattttcacgcggtgctggcaggccccggtggtcccgggaacgggctgcggtccctgtacccgcccccgccacctccgcagcacctgcagatgctgccgctgcagctgagcacctttggggaggagctggtctccccgcccgcggacgacgacgacgacagcgagaggtttaagctcctccaggagtacgtgtatgagcacgagcgggaagggaacacggaagaagacgaactggaagaggaggaggaggacctgcaggcggccagcaaactgaccccggatgattcgcctgcgctgacgcctccgtcgcctttccgcgactcggtggcctcgggcagctcggtgcccagctcccccgtgtccgagtcggtgctctgcacccctcccaacgtatcctacgcctctgtcattctgcgggactacaagcaaagctcttccaccctgtaagggggaagggtccacatagaaaagcaagacaagccagagatctcccacacctccagagatgtgcaaacagctgggaggaaaagcctgggagtggggggcctcgtcgggaggacaggagaccgctgctgctgctgccgctactgctgctgctgccttaagtaggaagagagggaaggacaccaagcaaaaaatgttccaggccaggattcggattcttgaattactcgaagccttctctgggaagaaagggaattctgacaaagcacaattccatatggtatgtaacttttatcacaaatcaaatagtgacatcacaaacataatgtcctcttttgcacaattgtgcatagatatatatatgcccacacacactgggccatgcttgccaaggaacagcccacgtggacatgccagtcggatcatgagttcacctgatggcattcggagtgagctggtggagccagacagagcaggtgcggggaagggaagggcccaggccagacccatcccaaacggatgatgggatgatgggacagcagctccttgctcagaagcccttctccccgctgggctgacagactcctcatcttcaggagactcaggaatggagcggcacaggggtctctcttcatccactgcaacccatccagtgccagctttgagattgcacttgaagaaaggtgcatggaccccctgctgctctgcagattccctttatttaggaaaacaggaataagagcaaaattatcaccaaaaagtgcttcatcaggcgtgctacaggaggaaggagctagaaatagaacaatccatcagcatgagactttgaaaaaaaaacacatgatcagcttctcatgttccatattcacttattggcgatttggggaaaaggccggaacaagagattgttacgagagtggcagaaacccttttgtagattgacttgtgtttgtgccaagcgggctttccattgaccttcagttaaagaacaaaccatgtgacaaaattgttaccttccacttactgtagcaaataatacctacaagttgaacttctaagatgcgtatatgtacaatttggtgccattatttctcctacgtattagagaaacaaatccatctttgaatctaatggtgtactcatagcaactattactggtttaaatgacaaataattctatcctattgtcactgaagtccttgtaactagcgagtgaatgtgttcctgtgtccttgtatatgtgcgatcgtaaaatttgtgcaatgtaatgtcaaattgactggtcaatgtcaacctagtagtcaatctaactgcaattagaaattgtcttttgaatatactatatatattttttatgttccaataatgttttgtacatcattgtcatcaatatctacagaagctctttgacggtttgaatactatggctcaaggttttcatatgcagctcggatggacatttttcttctaagatggaacttatttttcagatattttctgatgtggagatatgttattaatgaagtggtttgaaaatttgttatattaaaagtgcacaaaaactgagagtgaaaataaaaggtacattttataagcttgcacacattattaacacataagattgaacaaagcatttagattattccaggttatatcatttttttaaagattttccacagctacttgagtgtctaacatacagtaacatctaactcagctaataatttgtaaaatctttatcaatcacattttgccttcttttaatttttatgttcatggacttttattcctgtgtcttggctgtcataactttttatttctgctatttgctgttgtgtaatatccatggacatgtaatccacttactccatctttacaatccctttttaccaccaataaaaggatttttcttgctgttttgatttcttctattatttgtggaatgaattataccccccttaaatatctttgtttatgccttatgttcagtcatattttaatatgcttccttcatattgaagctgctgatttctcagccaaaaatcatcttagaatctttaaatatccattgcatcatttgttcagaatttaacatccattccaatgttggaggcttgtattacttatatttcatcatattctattgccaagtttagtcagttccacaccaagaatgaactgcatttcctttaaaaattattttaaaacacctttattgaaaagatctcatgactgagatgtggactttggttccatgttttcattgtaagaaagcagagagcggaaaatcaatggctccagtgattaatagatgggtttttagtaattgacaaattcatgagggaaagcatatgatctctttattagtgaatcatgcttattttttactcttaatgccactaatatacatccctaatatcacagggcttgtgcattcagatttttaaaaaattaggatagataaggaaacaacttatattcaagtgtaagatgatatcaggttggtctaagacttttggtgaacacgttcattcaactgtgatcactttattactctgaatgcctactattatcctgattatggggtctcctgaataaatagagtattagtccttatgtcatcattgttcaaaattggagatgtacacatacataccctataccaagagggccgaaactcttcaccttgatgtatgttctgatacaagttgttcagcttcttgtaaatgtgttttccttcggcttgttactgccttttgtcaaataatcttgacaatgctgtataataaatattttctatttattaaa

SEQ ID NO: 90 - DNA, 12344 bp, Homo sapiens
gtagtgaaactttagaaagaagagccgggaggatgtattggttgttaggaaaatgtaggctaccagtagaaaatgacattctctattaataagatctgaggtgcgacacacataattgtcccaatttttaagattgatggggagcatgaagcatttttttaatgtgttggcaggccccattaaatgcataaactgcataggactcatgtggtctgaatgtattttagggctttctgggaattgtcttgacagagaacctcagctggacaaagcagccttgatctgagtgagctaactgacacaatgaaactgtcaggcatgtttctgctcctctctctggctcttttctgctttttaacaggtaagttttttcttaaaattaagatcccatatttatactgaactggatatgatgagtagttgtttatcatattttaaatcctaatgattttgatgtaaaagaccaattctgagagattatcataatgatgataatgattgtgatgacgacaatggttatggtaataattattaaaattactgtgatttgttgagcatatactatattctaggcatgtacgaagggattttatgtattgtctctgagactcataataaggtatttctatctctgttcttcatataagaaactgtggaacagagaaattgagaaaatcagcaaaagacttgcaactagtagttagaatctggaatttgaatcagattctcttgccatcacatttaatgtttgttccataaaactagattggaggatggataattgcattaaatattggttttgctttccagaacaaagaaatattttcctccccttagttattattacaaagacattcaaataattaaattaagacaatggggaaattggaaactcaatgagaaaaatctttgaaaatatgtaattgaaacttagaatgcagaaacatatgtttctggtgagctaaataatcttagagaaggagaatatctttggacactttagtgaggttcaaagcacaatcatacttcaaggttatgttttttaagacagaaccatcggaatgagcaggtccatcataagctattttcttccttattattctactctttcacgttgtagggcacaaagcaaatgctagtttttagacctaagacctagtttcatctcttctattaatggcctgtgtcacttaaagaaataacataattttctgagatattttgtcatttgtaaaataatagaaataaaactaagccctgggaccttccatatcttatgtatcattttgtgtgacagtagcagatgaattttactactatgcaagattttaaatggatgtacaagtaaaaaaaaaatcaatgagatttagctgatagagaagccagtgttcactgtagctggtcataattacaaaaacaaatacacttagaaatacaaaaaaaatgggtaaaggattcctgtgatattatggagtaagcttgactactaaagccaaataaccttaatgggtagttcaatcagttgctgagatggcagaaaaatatatatctgactatgtaaagtttagctgcaaagatagtctcagaaatcaattgttatttccttttcttctctttacaaaggtgaattgatctttaacaggatctggttgactaatacagtttaccaaagcatggatgcttcacagacatactagatagtatttgggaggccataatgcctaagggccttaatgctgaaacagagtaaagtgaattttagccctggcactttcattttatagctttgtgaactctctgatgtttatttcacttatatataaaataaacatataaaggactatctctgtgtggagaattaaatgagaaaaaggcatgtacaatgcttaacatagtggatggggtatagtgcatgtttaacaaatgtctattaacattattgccataataaagtttaataaaaagagtactaaattggactccgtcattgtgaatattaatcctgtttttgccttgccaattcctacgtatgagacattaggcaaatctctcctcttttgatgacagatttgtacagtggagacttactgaaaattctaataataaaatatccctggctataaaaaccacttagagtctttaaaaaatatggactgtccaggaactctctggttttatataatagaatttttaagtgattgccctaagaatttgtcattttaataatcacccatattgctagttataaatcaataaggctggtaatcactgctgaaaaaatgaacagtaaccttctttcaaattaaaaaacaacagcttgttttctccttatctttattattagagattgtgctttaaggaatttccggttgttatcccataagtgttggccatcattggagatggattccgctaacccacactctctctcattgcagtgctcttgggcttatgtgtcagagggattgggaaaggagtcccataggaatggccacacatcaaaactcagcagcccattccaagactggattgagggattttattatttaagtattttaaaccactgaactaattagtcacacaaactaaaattacacatacaatattaagagaaaggaaaagggagagaaacaagactatatatatgggatcttttccctttttaggaatttagagagatgtaaaaggagaaataagtcacaagaatgaatgagttgttccttaccagtttatatttgggccaagttttaaaagttgagcaatttcaaactcaaagaacaaactacaagcttaatctctttcccaactgcctgtggcaaaggcttttgggaggaactgcatgaaatgaaccttgaaatgtcaaaggtagaggatactttccaattcaacttctccacagtgagaccagcgatgataaggtcattttcgtagtaaattagtgactgggctaggactgtaacatgaatttccagatccttaatccattttttttctaccccaccctaacctccaacaattgttacctcctcatggttcatgtctttatatgaccttcttaagaagtgagcagattaaaaaaaaaaagaagaagaagaagaaaacaaaaacaaacaaaaaaaatacgatgactttttaagatagccaagtaccaggagtagatattaggaatttcctaatgttgaaaatttcactttttgtacatcaatgaattacagtgtttgaatgttgtgcttttctttcaggtgtcttcagtcagggaggacaggtcagtgcctatttttatctctgctttctgcctgggtggtgcttggcttgatcttcactggccaaaaagaaatttgtctatggttaacagagcaaaaacaatgagcaggcaaaccttatgcagacatcagcagaaattattattctttaactaaactcttgtcagtttaaaagaacctaaccacacattctcataattttttagggaagaataaatataaataaaaaataggatgtatctgggataaaattcatgctctatcattgatttcactgtgtgatcttggggaagttactcaacttctctgagctgcaagttccacaactatagaaaagggataatattcacttcatagaattgcaattatatttaaattatttaaacaatgtgaaagtatttggcaagccattaaaggctatatatgtattagttatcgattaaaaattaacatcctctgaagaagttaggatataagttattatttctttttcagaaataagaactgaaagtagataagaaactagtttactgctctgtaatgaggatatacagactgattcactcaaattttaataatatttggtttaaaaactggaatgagcacaagttatcttcatcattggatttttttttcctccaaattagttcaccaatgtctttctatctttttcattttaactgtcaaaggacaacacaagtactatttgttctgccaatcctgttcctttgtccatattaagcatttctacttggtcttggcactagttcttgtttagccttggcgtgccttgttatacctttgacatgaaaatttctagacactactgctaactaattggagttggcaaagccattggaaatattttccaaccctgatatacccactgcattatataagaatgttagttttttaaattttagcatctcagaaattaggatgcatcttacaaatgatgatgcatttgtgtgtgtgtgtgtgtgtgtgtacatgcatgtgcactttaggtgtatgtctaacacatgcacacatgtgtgttggcattgtcatatgaaactgtataccttcaagttgtattattatgtttaaataagcatgatagtatggtctatactaaacatgaaaacaaacacacaaggaaaggacataacacccagccaacacatttcgtatctcattaggtagtaaaatatagtaaaaccattactcatagaattaagaaatatggaatttaatcctagttttctcattaacacacacgttacttcccttctttgaacgttgatttctcagattttttttcttacaaacagaggttttattgcatttggtccacagacatatttcacattatctcatggagcagggcccctgggtgggggtccctgcgtagtacttggcggggtgtgtggctgggagagatggcaaagtatagctgctcaggcccaaaaagggagaaggaaggctggggtctccttaaaacctactgaagggccgggcacggtgcctcatgcctgtaatcccagcacttggggaggccgaggtgggcagatcacctgaggccaggagttagagaccagcctggctaacatggtgaaaccccatctctactaaaaatataaaaattagccaggcgtggtggagtacctgcagtcccagctacttgggaggctgaggcaggagaatcccctgagcccaggaggtggaggtgcagtgagccaagattgtgccactgcagagtgttttctaaagttcatttaaattttactacttactgattttatgctttagatgggccaaagtcttatagtttgcttgcttcatgattacctggattgcttactaaatatacagatccccaggcatcatgcaagacattgaataataatcagaaaggtagggagtttgagtctgcattttaaataattatccagatgacatttatacataagaaaactgagcatttttccctaggtaagaggaggcaaactgtattgggaagcattggctctggagtcagataatatagatgagtggagtcctcattcatacttacttgctgtatgacttgaaaaatgtggtttcccttctcattgcctttgtttccacattactaagatgaagatttgaattcaatgatctctgaagccccttcctgccctaactgtctgaattgttatcaaccaagcctgtcctgccaaggctgctgtctcttctccactcaaatataaatgacagggaagctcctatacttttaaatggtactgaggctgccatttctcttttgcatgcctggagggagggtggaagtttcaatgccagcagaagacattgaaactatcattaggagcatgcttgctcaagtctgatccagccaggacaaaaggaagtaagatttcctccaacactgaagtaattcttctcatgccaagaattctctacatgatgagacaactgatgggaaattatagttagcagtctgaattatggacttcaaaaaatatcacattaatttgaaaagattattcaagctaaacaaaatcatgttgccagacttttggaaatcatattccagtaaaattttccctgtaaatgtaaatgactaatatgctgacaactctttaatttgccaaggagatagattaaatggcacaataataacaataagagtaaaataaaactactatttgtcatcactagcgtttcattaagtaatttgttgtatagcgccaaaatgtttaaaagacacattttcagaataaagatagtcctttgactgaatacattttgctttttgaatcacttactgcattgcctttaatatttttatattttcctatcaggctctgtatttgggaaccttatccttaaagagctgtttagatgaatagttcgaaatgaaataaccagaacaagccttttaaaagcaatgattggcaaccattttctgttacaatactttttgaaatacttaagtttatttttgcttgtattttaagataagaattggtgaattttcatacaattggtaaaacaatgctccatgactctaatgagtttgaagtttttcatttttcctaattagcttgattttgcttaaaattaatatactgacaaaatgtctaaataaaatttggaaatgttatctagtacctataacttaattacaaattgaaaaactaaagcctcagaaacgaggtctagctgacttacatctaccaacagcagtaaagctgcaaagtcaacacttcaagactcctgactccatctggagtgagctttccgtggctgcatactgtttttaatcagcaatagagggccattgtgtagtgaatgtgaaagagctttgagcagtacaatttcttaagcaaatataaggtagtgattactattctcacttaagcaaataatatgataagtatattagtttcaaataagataacttgtgtccacatgcaggaaagatttgaaattaggaggaaaatgaggaagagaccatgttaaaatgtctcacacagtgagtttagaggctatctaaaattaaaggaggaagtatttgtgcaaaagtagctatttctctcacccagccgaaattaaggagataaaaacttattttattagtccagacaagaaatgttgagaactggtataggcagtaaatttggaactggcaaagaaaatgaggtaaagcaatgcagaaggtaacacaagggaaaataaatggcaatgtttccatctgagggagggttggagaatctaaaaaatgctgctatcatgaaaaatggaaaaaatggaaaaatggaaaaaacagaatacaaaactagtttgaaagaaaagagttgtactttgcacataaatgtcttaagtatgaatgaaattgagtaaaaggtttcatatatatgtatacatacatacgtacgtatgtatgtatacatatacacgtatgtatacatgtatgtacgcatgtacgcatgcacaaacgtatgtatgcatatatgtatgtatatgtatgtatgcatatatgtatgcatgtttacatgtatgtatgcacatatgtatgtatgtttacatttatttctgcatacatatgtatgtatttctgcatgcatatgtatttctgcatgcatatgtatttctgcatgcatatgtatttctgcatgcatatgtatttctgcatgcatacgtatgtatttctgcatacatatatatgtatgtgtttctgcatacatatatatgtatgtttctgcatacatatatatgtatgtgtttctgcatacatatatatgtgtttctgcatacatatatatgtatgtgtttctgcatacatatatatgtatgtgtttctgcatacatatatatgtatgtgtttctgcatacatatatatgtatgtgtttctgcatacatatatatgtatgtgtttctgcatacatatatatgtatgtatttgaccattgagagttagagtttgagatatttataaaaaatctatgaaaaatattctgggatttttcagtaccatatgggaaattatatgtcattaggaagagaaaaccaagtatattaaactatctaggaaatgaccataattaatattcaggagtaaaaaagaaaagacagcaagagagagaagaaacagacgaccagagaaccaacatataatgaaagtctggaaagagtttcaaaaaggttggagtgatcaagagtagcatatgtcatgaggaaatcataaaagttttaaaacaaccaatagatgtattctgtatttttgaaagcagtttcagtagagtagaaaggggagggaaataagggtgaggggaagccaagcttggtagcaattaggacaacagatatggtaaagaatggaaattatttaaccacataggtagtgtttgtcagtaatagacagaagagatgccattatatatcccaaatctatgtttgtgtgattgcaaattttcattggttttatctgtaaacctaaaacactagacttaaatatgaataatcctgagtctttagttgacttaatgaccatataagctcaaatttccagaagcaatttgcaccttctccaacccctggggcccagagagagtggtcctctcctgcccagccaccatattaaaatgtctcatagagtgagtttagaaggctctctaaaattaaaggaggaagtatttgggtaaaagttgctatttctcttatccagctgaagttaaggacataacagctttatttaaaacacatcactgaaagtattcattgataaatcttgaaccatcaaagctagaagagtcccaggataccatttaatctcatggtgttgatgattttctatgagttacagagatcttttagagctactgtagttagcatagacctgtaataaggttactttctacactcctaacccagaactatttcaaatattctatattagttctctacaacttttatatgaccacatttgttccttataaaaaccttgggaatctgaaaattaggcatgacatgtgttccttgttgtttcttggttaagaaaattgaggtgcaggcatcgagtccgttgttcaagataacacagacagtcaatggcggaacaggttctaaaacacgattctcagcttacttcagagatcattgaaggccactaaaatttaagagtatgatatttatctgttctatggaagtttgttcatatgccacttgattgatttgctttcatttattgaaatgctttgctcttcctagtcttcttccacggggcagaggaagaaaatacttgggtgtgggttcagttgtgctaggctcaactgagataatctgtgtgaaagtagctggaatattttgaagcaattgataaacacaagacagtatcattttagacagagagaaagcaagtttcctctctccatatgtaagtgtcacttcattccacacagatatatttggaggggttcagcttaacctattgcttgtcattactcttgaaataatggctcaaatgtcatttacacaccaaatatggacttgacattgtgttgaaaacaatcttaaaactccagactacttttgaaaaacagctatagttgaaaggatatgttagtggcaaaggtgctaccattcctactatggagcccataataataattattaatcagtcataacatatgttctcaacaatagtgcaaccttagaatcattttaaacacagcaacttaggcagccattactaaatgattgtagtaagcacaaaagttcaaattccacagactctgaaacagggtaaggtaataaaaagacatagatgcacctataatcttagtgacttggaaggctgaggtgggaagatgtcttgaggccaagagtttgagactagctagggcaacagaggaagactctatctctaaaatacatattttttatatatatatatatataaagtatatattttatatatataaagtatatattttatataagtatatatttatatatttatataatatatattatatattatataaatatattttatataatatataatatatatttatattatatattatatattatatataatataaatatatatatttatatatttatataatatatattttatataaactatatatttatacaatatatagtttatatattttatataaactatatatttatacattttatataaagtatatattgtatatatttatatattatattatatattttatatatatagcaacatagcaagactatctctaaagtatatatatttagtatataaatatatatttataatatacataagtagatatatttagtatctatatgctttagagataagagtatatatgtactttagagatacactttatatatacatatcctatatagattagtttatgtgtatataagtgatatatttagtatctatatactttagagatagagtatatatatacttgatatactttatatatacatatcctatatatattagtttatgtgtatatacataaacacattagaattttgttttcaagagcttatggatggatattgcatccacagggaaaagtaacaagcatcaggtgatgtccagtgccccttgtaaggttcatccatgttttttgtttgtttgtttttgtttttgtttttgtttgacggcgtctcagtctgtcgcccaggctggagtgcggtggcgcgatctgggctcactgcaagctccgtctcccaggttcatgccattctcctgcctcagcctcccgaggtgcccgccaccacacccggctaatttttttttgtatttttagtagagacggcatttcatcgtgttagccaggatggtctccatctcctgacctcgtgatccgcccgcctcggcctcccaaactgctgggattacaggcttgagccaccgcgcccagcccatccatgttttgatagcaatacaggagtactgttagagcacattaatatgatgtttaaaaagtcgtttcatgaccgaaaaccactctcaattggaatagtttaatgttggagcaaaaagttttacccatatagcatttgactacatcattaatttactcctgaatacaatctgtattccttgtaatgagtttcctgtgactcaaagaaaatgtctcaagtatatttaatgtattctacttaagtaggtaagtagaatacatcagataaggagagctattttatatttcagaatgctttatgtcacaactatttatatatggtttttaaagtttgctgtctaaagcttctgttctgaaggatggtctcttagaatgcactgatgtcaatgtcactctgcttactttggtaggttgactgtggtgagttccaggaccccaaggtctactgcactcgggaatctaacccacactgtggctctgatggccagacatatggcaataaatgtgccttctgtaaggccatagtgtaagtattatattcatcaaagctgacccttgcaaacacaaacttccataataagactaagacactttttcgaggtattatagaaaacacccatacctccccatagagactgaagaaacaagcttcaggcaatttgattgaaaacagatgggtcaaaagcaacaaaaacattacatactaaattatttgaagacataatcttaatcgctttgctttgttattattaatttttattgtcttagacaagttttcaaaaacattcacacatcttatacattataacttattatatttaataattttgatatgttttaatgttttcatttgtttctaattagaatttgcaatatcaatacataatgaacatatgtctacacttatatataacacatctgactaattaataccaaacttttctcaggagaaagtcagtggtgtaatatgagatttgaattaatagatgcatattactgagagggcttgaatgtgtcacctgctctaaaatgtcaaacgcctgaatatctgtttcaacttcttacatcttctgtcagaaaaaaactatagtccctttgtcattatttctcctgtgacctctacctttttcaatggtatacatatttactcttggagaatgagcaattggtaccaaaaagtctaagacttatgataactctgaaatttgtttaagattcatactttccacagctaggccagatgtaacctctgagtgcatttaattaacatcttctgaatcatataaatggaatttatagaatcaaataattaaatggaccatgccattgttaaatatgtttagaacttctatggtgagtacttacgatattgcactgagtatatatttgtctttcttttttgtaggaaaagtggtggaaagattagcctaaagcatcctggaaaatgctgagttaaagccaatgtttcttggtgacttgccagcttttgcagccttcttttctcacttctgcttatacttttgctggtggattcctttaattcataaagacatacctactctgcctgggtcttgaggagttcaatgtatgtctatttctcttgattcacttgtcaataaagtacattctgcaaaagca

SEQ ID NO: 91 - DNA, 9598 bp, Homo sapiens
tgagctgggaggctccagagctggagaatgtttgctggacgcagtcaaagctgccctgagggttgtctttgcccacatttgacaaataaaagttaaagttatgaacttcattgaggggatcatttttgggaattttgacaagctcctggagtctttggaactgaattgaaggtcgaaaagaaattaaattcttgtggctctggtaagtctggagcgcctggatcgccgactcggtgagcttcacatgcagtacggtgatgttgtcctgccccagccgtccgcacgagagcccatagcgctgccccgcgacccccccacccccgacatcttaaactcccagaggtgccgccgccgccagtccagctccagcctccactgcggccgcagctgcttgggcttctgcagccgccgccactgctagggccatcccgctgctggcgtactgtcatatactgcgcggagccagacctcggactgccatcgccgccacctgccccaccctctggccccgcgccccgccccaggctagtctcattggtctagttccctcagaaccgtcctcatcggccgccctccactttcacgggggcggggcccaaagtcgctggagttttgctcctgggactggacgtccgagaggtaagagagctatcacaaggttttctaatccttatgtttcttttagtggatctccaggttactgtggtttgtattatcaggctacttacaaaaatgaatacctctttaaatcaggccattttacagcaaactacggtccttgatcaccattatgctctgaataaagactatgagcaattgcacttgaatgctgttaaactttattgactgaactttgaattgtttgattttgatcaggttggcttgtggaaagtgctattaagaagagttctttagttcgttggtattatcctcctgatagctattataaaagtttccctgatgtgtcctctcaagaatcttaaattctcatatgcagctatcctttgtacattaaatggtctccttatggttaggataacaaaaacatgaagaaagcatataagattccaactaatttgacgttgtgaattgtgaattctgaactgaaaccaagtaagtcccttatgatcaggctccaaggttttggtcagcctctcaaaattgagaggctgaaaccctttgaccaaaattaacacatttgccccttccctccagctcctggaaaccactaccctaactctgtttccataaaatagtaaactattttagagtccacatataagtgagatcatgtagtacccaccgtgggcttattttaaggctctgagtaaatcaccatctctctgtgctagggtattctgagtcagtcttgttataaaatattttgtttaggtaacatattgcaaaacgtttcataattcaatggttcctttcccagaaaaaaagcagtgaaagttccaatagccaaaaagtgtctaactcaactgacctttgggaaaaaatatccgtataattccagatagtcctaacttctgaaggtaatatagcctggcctctgttgataaacaaacaaaaacaaaaaaaccacacacacacacacaaaccagcttcttgtctttaagtgtgcaagaatgttagcacttaaaatttttaagatacacaaaaactaaacagaactgttcaagtttttaaagggagcttggaaatttgaagaaagtaaagttaaaaatattgccccatgagtcatataattatttttctttttatttctcatagcttccctcctatccattatttaggcaattttgtatccaaatttaataatttaacaccttatttgttacaagaacacgttactatgttattttaagcttttttgggcaaattacacataattagataggctgggttagggctgtctacaagatcccagcctagagtgtggtgcagtagcctattttctctaggactcttgctgcaacaggatatgggagaagggaaacattaacgttagcagaatgggaggaatcagattatggagacatgatccttgccttctggcacctctccagctgatttagaagaggacacagagggagacagacatatggccatttctataattataaactctgctacatgctgagaggatggcttctcaaagccagttagtgtacaagcagtggaggttgggactgccctacttctcctgcctagggtcacacagtctggcagatctggaaagacttccctgagaaagtgaccttggaactgataccttagtggaaataactaggcattgggagggggtgaggtgaggagaaggtcaagagctttcatgtagagggaactttgtgcagagaccttagtcaggaagaggttttgcatagtggaggaactgaaagctaacagccaggctacagtacagagcaaatgatgctggggtgtgaggtgatgtcaaaaggtagacaccagggctagagggcgcataatcttgcaggccgtgctaatgattttgttttctacccaagaatgctacttcaggagatcagtcaaaaggttagggtgatggtgacggtggaaatatagaaaaaggaatttattcaagaggtattcaaaaagaagtgaaatagagatgagttggagatagattggataaaaagagtgagggagagggaggtgtcaggctgcagcccaggttctgagttgccaaagaggagtcttttcctccaggtgagctaaggcttagaaccacgatttttggtcactttttcttattttcagtgtgagaagtggcgagttggctgtccaggtacacactgtcatcttacacttactgtttaagacagaggcgcatatttggaaagtgaatgagtcaggagccagaggagaaggtatgccggcagagcctagggcggagaggaggaagagagtctgggggcgcgtccccaaaaaggagacagggaagacagagcagaggccggggaggggagagcaaggaccatgacaggaggaaagagaggctagggaacactgaggtggaggaatcctgggatatgacagttgtaaagaattgtagccaacctaatccagttctctcaatgtgcaactgaggaaattaattttcatgcgtttactttattgtaaatgtggtacttgcacttgagaaattttggaaaacataaagatgtaaagcaaattaagatcactcatagtctttccacctagagacatgtactgctaaagcaaggactttgatccttttttccctttgcatttttaccatggttggaattgtaacacagacacaaccttatgtcctgcttccaaaacataaataatggttgtaaagcgtcccacacgttgacccaaagtctcctttgaaacaggaaattgagacacgccggttgtgaaacctactgaagtgagcggcggcgccaggattcctgggaccccgacctctttgcagctcgcacagctaagggcgagggcgcccttcggcagaagcagcaaaccgccggcaagcccagcgaggagggctgccggggtctgggcttgggaattggctggcacccagcggaaagggacgtgagctgagcggcgggggagaagagtgcgcaggtcagagggcggcgcgcagcggcgctccgcgaggtccccacgccgggcgatatggggtgcctgctgtttctgctgctctgggcgctcctccaggcttggggaagcgctgaaggtgggtggaacgagggcgcttgagtgcactcgcgggagggcggagagagggagctgggtagggacggggagggcaacgcctgatggggactggtgagacccgggacgcactggcgcgatctaggtagaaaactcgctgctccctggctccggggagaggcagcgcggcacagagttcgctggcatcagccgcctcctgaagctcatctcctcttgtttctttcttccttctctttatgctggctgctctcccggccacttgctacacgcctccaatcttcattctctcccagtcccgcaaaggcttttccccctccgctgcctccagatctcgtccttcgccaatagcagctggacgcgcaccgacggcttggcgtggctgggggagctgcagacgcacagctggagcaacgactcggacaccgtccgctctctgaagccttggtcccagggcacgttcagcgaccagcagtgggagacgctgcagcatatatttcgggtttatcgaagcagcttcaccagggacgtgaaggaattcgccaaaatgctacgcttatcctgtgagctgagggataggatcctgggccggtacccaaggggagagaatggccacagaaactcaactgggagactgtggcaccacctgatgagattctctgctctgtccaccctcttctgatttcccttctacctggagatgtcccaggctttgactcctcaaagtgtccctcgttcctgcctactccaggtcacttactttcctttccctgaagtctgggtccccattataacctgcacatcaatttcttctctttcatctctcccagtcttttaaacccttctttgatctttctccattcctctccacagatcccttggagctccaggtgtccgctggctgtgaggtgcaccctgggaacgcctcaaataacttcttccatgtagcatttcaaggaaaagatatcctgagtttccaaggaacttcttgggagccaacccaagaggccccactttgggtaaacttggccattcaagtgctcaaccaggacaagtggacgagggaaacagtgcagtggctccttaatggcacctgcccccaatttgtcagtggcctccttgagtcagggaagtcggaactgaagaagcaaggtcagcctgccttccttactccctgcattccacttcagggctccaaacgggcttttccattccagggttctcatccctttgagcattcaaagaagaggaaggcccaggaggggctggataaggggtgagggtatttattcatttcacagacatcaactgagcacctcttgggttctatgaattcaattaatgaacaactgggggtgaaaggtgtcaggcagttagttaggatccctgcttggtagggggatgttaattaatgcaatgcttgaaataggctacatatgttacttcaaaacaaagggtgttataggggaacagacaaggggcattcataggaggctgggaccagagaagaagaaggagtatcagggcaggctccctgaagaaggtgggacaaatggattgaaagttgtgggagacttcatttccagaagtgaacatgtcaggggcatacaggaaggagggaaataaagacctgaaagtcaaaaaggatgatatgaggcctggagcctctaatgcagagttttcactttaagatcccccccattcccttgttggatacagtgaagcccaaggcctggctgtcccgtggccccagtcctggccctggccgtctgctgctggtgtgccatgtctcaggattctacccaaagcctgtatgggtgaagtggatgcggggtgagcaggagcagcagggcactcagccaggggacatcctgcccaatgctgacgagacatggtatctccgagcaaccctggatgtggtggctggggaggcagctggcctgtcctgtcgggtgaagcacagcagtctagagggccaggacatcgtcctctactggggtgagaaaaagctgggcccaagctggaaatggcaggaggtggtcctcaggcatagagggaggcactggggtgggatgtggcttgatatacccaggttagaggagtttcagagatgaggcccccagtaaaaggatagagagaggggttccagacacaggaaggagggaaataaagacctgaaagtctaaaaggattgaaatagtgctctctatatacaagaagaaacaagactacaaaactcagggatccagaagtaggcagcgaataaacaatcccaggacgattcattccttggcttaaagggagccaggcctttgggaaggcaggttagcaaagatagcttggttggttgagtgctccctgtgtaggggccaatgaatctgcatataatatctcatctcatcattcacagttttctttgaagcaagtactgctcttttcgttatatagatgaggaaatgaaggcggagataggttaactgcccggagccacatagaaagtggacgggctggatttagattcaggtctgccttgctacaaagctgttgccctttccctctatgctacactagcaaatgtcaaagtgggctgaatttgggatgcccaggcactgaaaacaagatggggaatctaaacttatgaggaatagaaattggggttttaagtggaggaggaaataagaagcacctggtaccctcacacatgcctagaccaggggattggatatatgtagagaggggtcctgtgctgagagacagcctatgttcctccagagcaggtgggagctacacctccatgggcttgattgccttggcagtcctggcgtgcttgctgttcctcctcattgtgggctttacctcccggtttaagaggcaaacgtaagtctcccctttccctttcctcaacctctctccccttcattcctggcttcccttttccttaatggtctttccctttctattctctcacagttcctatcagggcgtcctgtgactcgccttgccacatctgtgtctctggaacccaggacctctggacctcaggttcctaagacttcagtcctggtctgctcaggaattgaagatgtaaggaattgaagataggagagataccttgaaaaagtagagaacagtcatgaggcagctttcatcacacccttttaacatttatctaaaagaatttaaattctttttcaaaaattacactacaagtttataagcccaaatggctctgtgaaatcagaagtgcaaaggtgtgcaaacttgtatctgaagacctaccagggacaagcaggtaagagctgatgtgagtgtgtgtgatgggatctgtaaggaactggaacacacatgtcctatccaaaggaatcagctgcagctgcttgttgtcaagtataaagtcaggacctggcttggctttaaccgtttttcaagaaaactggaaatctggattttcagcgaacatgcctgattttaaaaggttgactcaagtttttacaaaatactatgtgggacacctcaaatacatacctactgactgatgacaaacccaggagtttgtgtgtcttttataaaaagtttgccctggatgtcatattggcagttggaggacacagtttctattgtaaatttggatttacgactgaagaaggacattttctctttaaaagaaagttaggttataagaaacagaggcgtctcacatttttacttggtgtaattaataaacgaagataaatcatagtgtatgtgtattatgttgaaaaaaactactctgagtaaggatatttctctcaaatggtcatcactttttttccttggaggaagattgtcatgaaggcatcccttccttcccaaaacgacaacggcaacaacaacagtctcctttacttacagctattaaaagagacaatgtagggaaagggccaacaccacttgggcaagcatgagctgcagcgatgatggtgatggtagcccagccatgctgtgttcttatcttagagaggacagagcaggaaacttacaggggtagcagacctttctgatgccaaagaaataaggaggccaaaatcatgtttgcctagctgggaggtaaatctcttggcagtcagggtccctgaacacccagaaaaaataagtgagacttaacggttggagagtgtttgcttgagaaaagtaacatttcacactctctatactagacttgcacatatgaatttaggatgtgcgtgaagattctgctagcttcaacatatcccaaagcacttggatatgcctataatccaagtgctttgggaggctgagataggaggattgtttaaggccaggcatttgaaatcagcctgggcaacatagtgagaccctgtctctacaaaaaattaaaaaactagccacccatggtggtgagcgcctgtagtcctagctactctggaggctgaggtgggaggatcccttgagcccatgaattccaggttagtgtgagctgtgattgtgtcactacagtgtaaggatgacagagggagaccctgtcttaaaaaaaaattatgctagcttttaaatcaatggttcccaaattgtagtaacctgaccaacagcctcagcaggacctgggaacttgttataaatgcaaattgttttgggcctcatcctatacccgctgaatgagaaactctgagtctggaagcaggctcaatagtcaagccccctggtgattctgatgcttagctaaagttagagaaccactgttcttagacattgtgcaatgttatacaacaacttcctcaaagtgctaagtgaaaaggacattggcctggcgttagtcagggaaggcgtcctggagggaggggaatttgaagcagagctttgaaaaacaaaggcagtgaggtgaaccagcaagtgcactggctgaggggactggagttctagcctctgaaccagtttcctcctgtgccaaaggaggataataattatctattattgattatctcctagacttgtggagttcaagtgtgtaatgccttaaaagatgtggaggctgttgctgtgtttggtaccacattgcccaccctcacgtggcgctcttcagcttaggttcctctagcagtgtcaagtttgtgaaccaaccccactggccttctgcattctgagggcacgtgtgttaaagtctctactgatgtccttttggaaatgcctctgcatgaatttatggtagctctgactcatctttaaacaattttaatttatttagaaaataaaggcttatctctccaggaaattttttcttccttcaaataaatactcagttccaaatatctcagagaatcctgagaattcattttagaacatgttaatactctttttatgagtatcatgtttcttactgagtgttgtgctgattgtgaatttattaccactctgctccaaattcattcttcataataggctcagtgacaatgaacagagttcctttaaaaagtcagcacattgttaagctttttcagtaaagggccccggagggacacagcaggaggaaggggctctcctgcagcttccagctactgcgtggtgggtcaatgaagtgggtgggaagacatcctgtgtggcgctgcctgtggtccctgcccctccaagtaccccattctatctgcagaccctcgcatctcctgtgcttaatccacccactgcctggaggtttccactgagcagtacttcctctgcaagcccctgcctcaagccaggagggtttcttccagcttatctagctacttcaggccagctttggcctgggtaaacctgtgaatgtctctgctacccaaggtatgggactgaaccataccttctccaataagatctgcgccccagccttggggaggag

SEQ ID NO: 92 - DNA, 1897 bp, Homo sapiens
aggtgcacctgtgggattgccgccaggtgtgcaggccgctccaagcccagcctgccccgctgccgccaccatgacggtgagcctctccacatgccgctcggatggatgctgcttggatgtgcagcctggcatggaagggctggggttctctgagcctgggaggagggtgttgggatggggtctgggaaacccctcagtctgggggtaggggaggcagctgcagatcctcggagcgctggcatgctgggtgtcttgggctgaagggctagcctctctgggcttcagtttccccatctatagagggagggctgtactccatctttccgctgggaacaaggaaagctgaggtggaagtgaggtgccccctgccctgggcacctcctaaccacccacctgcctgtttcaccagctcctccccggcctcctgtttctgacctggctgcacacatgcctggcccaccatgacccctccctcagggggcacccccacagtcacggtaccccacactgctactcggctgaggaactgcccctcggccaggcccccccacacctgctggctcgaggtgccaagtgggggcaggctttgcctgtagccctggtgtccagcctggaggcagcaagccacagggggaggcacgagaggccctcagctacgacccagtgcccggtgctgcggccggaggaggtgttggaggcagacacccaccagcgctccatctcaccctggagataccggtgaggacctggggattccgctgtggcgtggggctgcccctcccctggcggggccctgactgcccggagagctctctgggccttggtggttctcacctgtcaagtgggcgtggccacctgagctccctccctccggccctcctgacctggacggctgagctgctgcttgcggctggccgtgccctgcctcccactgtcctaggtggccagggtcccctggggaaattctgggcccgtcacctgagctcctgcagaagtggggctgggtgatgaagtggaagggaggctcctagaggcctccggaccctgctctgtgctcttggagggccctggggagacgtggattaccaccacatgtgagcccgactgcaccccaagcccgtgtggctcagccctcgctgcctcaggtcctatcctgagtacacggagaggggccctgaggggagaggggcctccaggaggacagggtagggccagagactcactgtgcaccccgtcccgcagtgtggacacggatgaggaccgctatccacagaagctggccttcgccgagtgcctgtgcagaggctgtatcgatgcacggacgggccgcgagacagctgcgctcaactccgtgcggctgctccagagcctgctggtgctgcgccgccggccctgctcccgcgacggctcggggctccccacacctggggcctttgccttccacaccgagttcatccacgtccccgtcggctgcacctgcgtgctgccccgttcagtgtgaccgccgaggccgtggggcccctagactggacacgtgtgctccccagagggcaccccctatttatgtgtatttattgttatttatatgcctcccccaacactacccttggggtctgggcattccccgtgtctggaggacagccccccactgttctcctcatctccagcctcagtagttgggggtagaaggagctcagcacctcttccagcccttaaagctgcagaaaaggtgtcacacggctgcctgtaccttggctccctgtcctgctcccggcttcccttaccctatcactggcctcaggcccccgcaggctgcctcttcccaacctccttggaagtacccctgtttcttaaacaattatttaagtgtacgtgtattattaaactgatgaacaca

SEQ ID NO: 93 - DNA, 794 bp, Homo sapiens
gaggcggcacctgctcccgtcccaggccggagtttgcaagctgctcgccgcccgcgcccctccctgggagcagcccgggaccgcggttggaaaggagaaagcggaaagaaagaaagaaaagaaaaagagagagggagagtgaatctgggagaaagcgcagagggaagagcagccagcgagtgtccggagcgaggaggaggaggaggagaaggagagggggaagaagaggaggaggaggaaggctcggcgccccctccctcgccgccaacctgccgcggggcgtgcggtgcttgggaccatgtgcccgcgctcgctccgggccgccacccagcgcctccggtggctgcgcgggcgccccaagtgttcgtgtgtctgcggcgggtgggcgtccggctcgcgctgccaagcgccccaagttgccgccgcgccccgcagcggggacgcgaagccggcgcggggcgggtgtatttacctgccgccaagaccttcattatgggctgcacttcagagggccttggaggaaacctcagatgccggcagttttcagaggttcatgctcaaatggggaatttgcctgatttatatactggagcctgtgttgtaagacagaaacagctatatttagccgggatccccagtccaggaagttgtttgaggtgcatcataggaaattatgaatggaagaaagtgagagtgaaggggggggacgagtgaggggggagggtggggagaacagactttttccctcttctaagaatttgattgataaaattataatgaagccttcgacaaaa

SEQ ID NO: 94 - DNA, 80049 bp, Homo sapiens
acattccggtgggggactctggccagcccgagcaacgtggatcctgagagcactcccaggtaggcatttgccccggtgggacgccttgccagagcagtgtgtggcaggcccccgtggaggatcaacacagtggctgaacactgggaaggaactggtacttggagtctggacatctgaaacttggtaagactagtctttggaacttgcccactccatttgagtagaagcgtggcttgctcacccacggtgtgcctttattggcactttggttttggttttggttttgacttggtttgaattgcttgacaggactggtcttgggaacttgcctactccatttgagtggaagcatggcctgatcaccgatggtgtgcctgtaccggcactttggtttctgtttttgatttgacttggattgcttgatactttggttttgtctttgacttggcttgaatttctggatactctgattttggttttgatttttgtttggtgtaaactgtaaaagtgtgtgtgtgccctttttaccggttctttgttttgtggtgtgcatgtggtgtgagcgtggtgttttgcctcaaagaagcatgggtcaggcacaaataagcccaccctactaggaactatgttgaaaaatttcaaaaagggatttaagggagactatgacaccaggaaaacttagaactttatgtaaaatagactggccagcattagaggtaggttggccatcagaaggaagcctggaaaggtcccttgtttcaaaggtatggcacaaggtaacctgtaaagccagggcacccagaccagttcccgtacatagatgcttggttactgctggttttagatcccttcacagtggttgagagaattgcagcataagtggctggcagaggcagagagagagagagagagaggcagagaggagagagagagacagagaagagaaagacagagatatacaagtagttaagaaaaaaagtgtaccctattcctttaaaagccaaggtaaatttgaaacctataattgataattgaaggtattctccataatcctgtaacactccaatactactttgttgtcagtgtaaacaagggcgtatcccaaaagcactgaggccttcctatcaaaaatccttaacccagtagcccgtggatggcccaaatgcattcaatctgtagcagcaactactttgctaacagaaaaaaagtaaaataataataataacttttagaggaaacctcattgtgagcacacctcactagttcagttcagaaatatcctaaatcaaaaaagcaaaaaagtagcttactaactcaaaaatattaaagcaaggggctattctgttaggaaaaaaaaagccatctataccaattctaagttaatttggacaaaacaaggtcttattaatagcaaaagataattaaaatcccaaacttgcaaggttttcaacaaaagtaaagtttgctaaaagttaacagtgtaacatgttttatactaacttctattcttgcggccttagacagtctagtccacagacacaaaagaagtttgctttggaaaaaaatggttatcatcttcaaaaaaaaaaaaaggaaaaaagggggggcagaatttatgtaaaaagagtattatatggtaaattcttgtcctgaaataaattagctggttgtttaaagaaagaaatatttgtaataagtcagaaagttgaagcatgttgaagaactgcctgcgaaagtcatgaaaaaaaaggttataaaaggaaattcatgcaagaaatgttgtctagtttaaaagtaattaggcctcctaaatgtaaaactattaaagaaacagtttatgtgcaaggtatataaaaaaagtaaaatatacttttaatagaagaattataaggaggcataagaatgtaaagttttacctacattaaaaggttaaaaatatgtgcgttttgttttaaaggtttaatcaagttttaaaatgttaattgaaaaaaaaaatctgtgtgtaaacatcggctaaagttaaagaggtatcatccagtttttctgtaaactggacattaaaataaaagcataacaggtttttcttgaagtaccaacctgctctttagcaaaaattataaaatgttaaaaagagtctataaaatcttaccttatagtcaaatattaaaaattagataaatatgtctgcaaggttttattaaaattaggtttaacattaataacacattaatataaaggtaaaatttaacttatctggtataaaaatcatacaggaagcattgttaaatgtaatggtatttggctttctttgatttaaaaactaataaaaataggtgctaaaggaaatttctcagtaacaaggcactaaggactataaagtccactgccaaggtccccacatttaaaacaaatggtcaatttcttaaaaattatatacttggcttatcttccacttaaaagtcttttagtatgcataccacccctagaatttccagtaaaccagcaccagcctgaagatcacgttctcatcaaaaggtggaaagaagaaaaactcgagccagcctgggaaggaccctactttgtgctgctaaccaccaaggctgctgttcatacagcaaaaaaggatggactcatcacacctgagtcaagaaagcgccaccccctccagagtcgtgggccatagtcccaggggaaaaccctaccaagctaaagctaagaaaaatttaactcttttcatctattctattactctttcttctttcctcattctattgcggaccatctagttattaacataaccaagtcaatttcacctcaaactgttgcatttaatgcttgccttgttataccctgtggagacttgccaagtcaaagacagctttctacttcagaaaagtacttctatccctcttgactctctttagactgggcattggtaaactaggaccgtttaatcgggggagatttcgataaagaccccagtgccaaccaggagtcttgccccccaacatagagcttttatgccatagttggtccaacattctgtggaccactaaagagcaaggatgaactgccccgactggtttttataatttcctaaaatcatacattcattttactagaggatcatagaagttaaagacttaaaacaaactttagcaattaagacaggataccaagatgcaaatgcctggttaaaatggatcaaatattccgcctgcacgttaaacaaaagcaattgttatgcttgtgcacatggcaggccagaggcccagattttcccctttctattaaggtggtcctccagttgaccaggcgtaggctgcatggtagctcttttccagtattctacagcctgaagtaataagtcatgccaagctctctctgctatatcccaaagtctggcaccctgtgggtcagcccccaagggccatccagcttccgcttcccaacattaagttcacttcatgtctctcacgacagggaggcaacttagcatcccttggagacctgaagggatgcgatgagcttaagaattttcaagagcttatcaatcagtcagcccttgttcatccccaagcagatgtgtggtggtattgtggtggatctttactgggcactctgccgaataactagagtgacacttgggctttagtccatttggctatccctttcactggggcatttcatcaacaagaaggagaaaaaataagacatcgtaaagtgagagaagtccctatggatctttcaactctcacatctatttagatgcaattggagtcctgcaaggaataccagatcaatttaaagcttgaaatcaaatagctataggatttaagtcaatattttagtgggtgacagttaataaaaatgtagattagataaactacacctattacaatcaacagcagcaagctttccatgagttaaaaaaaaaaaaaaaaaactcatgttggccccagccctggagctacctgacctgacaaaaccctttacaccctatgtgtcagaaagaaaaaaaaaatggcagttggagttttaatccagtctgtggggccttggccaaggccagtggcctatctctcaaaacaactagatggagtttccaaaggctggcccccatgtctaagggccctggcagcaatggccctgttagcacaagaagcagataaagtaactcttgggcaaaacctaaacataaagtcctcccatgctgtggtgactttaataaataccgaaggacatcattagttaacaaatgctagactaactagataaccaaagcttgctctgtgaaaatcccaacatcaccattgaagtttacaacaccctaaaccccgccaccttgcttctggtatcagagagtccagttaaacataactgtgtagaggtattggactcagtttattctagtgggcccaacctctgagaccaaccttaaacatcagtagactgagagttatacgtggatgggagcagctttgtcagcccctgcaaagtgactctgaagaagacaacaagccctgctccagtcacacttggaagctgactggtccacacacagccaaagcatgaagaaactcatcacaagactcattttccttaaaatttggacttgtgcagtaaggacttcaactgaccttcctcagactgagggctgttcccagtgtatacatcaagtcactgaggtaggacaaaaagttgctaaggccttattattttatagttattataagtgtactggaaccctaaaaaaaacttgtttgtataattttattctatataaggtatgtagcccaggaaatgaccaatctgatgtgtgttatgacccatctgagcctcccatgaccacggtttttaaaataaaattaagaactgaagactggtgagggctcataaacaacacaagtaaagtgttagccaaaataataataataataaaaaagataataaatagccccctgagagaattatacaatattataggcctgctacttatgcacaagacggctcataaggataccagacccccattcacatgctcaaccaaatcacacagttacaaactatcctaaaaagggacaggaattgctcactcagagagcttggctcttgagacaggagtcttgccgattctcccagccgaataaacctcttccttctttaactcggtgtctgaggagttttgtctgtggctcgtcctgctacacgttctatagcttccctttgactcagaaaataccaccaggggtctggaatattctagaatctttgtttcttacatttgacatttcttatgttatactgggtctagaatttaagctctctaagttgaaaatacccaagctgaataagtatgggtataaatacaattttgttcagtattgattttagaaaagttttaaatgaagcaattgttctttccaaagcttcttcatcaagtagaaaatgcagacactggttcctaaaaaatcttggaattttacattaatctgcagcttgaaaggcaagtgggaatgttaaagaaacattccaaccaattttgcacaggtcaaggaaaaccaagttttttcaaacatcatgtctcttgtttatttacaaaatcagatacatgcaggcttctggtgttggtggaatgcagctgacctcgtagaaacatttctggctgctcatttacactttgaagttgttaaaattttccagagcaaatatcctaatttctagtaacacaaggtatgtcatgtacagcacaactactagtttaaaggagagtcaagctagaatacagaatggctgttcccagtcataagcacattatccctactgaataaaatgaaaatggtgcaggcgggtaatgttttgaaagtaggataagggttcctcatgactttccttgtgaacaggggcctcggatcagcctgtagtggacatcagagagattcacgttaccccagtgtgataaataatgaagcacaatgcataattgtcactaagttcttagaactttctcagacccaaactaccatgcagaatgcattacctcaggctctgcagggtcacgagggagataacccagtgtcaggacaagtaaatagacataattgtaccacactcctgtcgttataacagccctttagaaaaactggaattccattttgctcagctgctttccttactctattggaaaaaacaaatggtctttgcaaacagcaatcctgagtgtgtaaattaatttctaactttacagttcaaccatagacctggttacagaattaacttttaaaatgaacaatttattttgtattctcacctgaaaatattactgtttatgaaaaatgcttaataaaatttaatgtttaaaaaatagaggcaatgacacaaaatatccaattatgttattgctatataactaataggaactctggtgccacaaggcttaaacgaaactcagtgctttttaagaagccatttttcagtgcttcttagaaaactgttttaaaactctcctactttaagaccaatggatgtcattttacaataccaaacgctgaagtaactctaagtatctcctaaattgtggaagggtgacgaaagttagtctctcattactcctgaatatttgtccaacttcaagaacaatctgagacctgaaaaaaattgatgttatttctcaaacggcctaacttatttttaaggagcagtacacaattttgcctgtgtatcagaataaagtagttgacacagaaccagctcaggaggcagaagacgtgagtatgatttgaaatcaccaatgatcagctgactctgtgactaaagtcctcagctaattgccttatttaagaacatgttgttacctacccctcatccgtagcacatgctctctttgtttccttcatagcacttaataaaacttataattatttttattttcatgtttatttactcactcatcaactcaaatatatatgaaggcagaaaacgtgtctgtcttgttcaacttagtatttcttccaattcatagttgaaaaaaaatgagctcaaagattcatgcattcatttatccattcaacagacatttgctaaatttttattttatgtaagcactagggcctagaaaagagaatctacttcacaatatttttaaatattgaatgagatcatatgcttactttatgaagtaaacatataattaaagtgaactgttgttattatttacttaatataaaaggattctaattccagagaaaatagcatctcttcctctacaaccaaggagcaaatattctcaatgttgcttaagataacagagttgtcaaacattggtttctaacctatgaactaatcttcacattaaaaaaaaatgcattatagtatgtaaatatatgggagaaaattctatttatatttcatgattttcattgataaaaaattgatttcatatggtgtaatattactgataaggaaatcttttgtcagagttcagtcataattcatgaacttagggaataaacttaaactgttcatggcacacagtcttttcagttcacatttatatgaacaatgcatttggatgcctttgttgttggagaatctcaaggagaagacccaagcaaggctgagaagaagcatcagaggcaaggcagagatgcaggatgccttaaggcatagtagctcacttaaaggaagacgtggttcagactgcagtatcaaatgaacatctacatagctcttaggaggagtaaatatcaaggcataatggaaacctgagtgaggacagcaaaacaaagtgtgtcaactgataatactaaaaaactagccttttagaagataatttaaaatacacattttaaaaacagaacattatccattatattgtaaccataattctctaccaatgtaggttgcactattgaaatagatgcatcagttaagagtgagttaccctttaagaaacagagaacacaatttgcagtggctttgcaataaggaaatactattgagacaagaagtctagtggtaattgactgtagacaataatgtagttgctcaaaataaacaggctgctatctgtgtgattctcttggccttttattcactattataagacaaatacttcttcgggaaattcagggtttaaagaaagaaggatgatggtgctagagaaagttcgctgtagggtttggctcacatctcattggccaacattgagtcatgtggcactcctggctgcaaaagatgtttatttagcctctatagaagagattaaagaagacaaaaaaaggttggggatgtagggttgaacaaatcaacctacagtatcttccacatttctttttcctcttagtgtatgtatttttgcttgtgtgtcaaactccaaaattatattaacagatcctgaaaaagaaatattattattcagtcttctcttaattaatagggactttagcaaatgtcatgatgattgatttccacttaggttactttgtattttatatgttaaaactttcagtacttctttggaaacaattaaactaggatttttaagccatggtttttagtgaatgggttatttagaggatttcctaagggttttgactaataagacatgtcagccgaaaaaaatatttgctgtccctttagggattcaaactatttagtgttacataacactactccaatacatttgtagctgactgctaataaactgcacaaatgtcatcatttcacatagtcagtctcagaagaaatcataaatataagagataaaaaaatttttacttctgcaaaaaccccatccagatctctgcttatctatgttgaaagagtaactgcgcaaaagaagttccaaattttatttttaggagactgtgaaaaagcatccaaaaggacatccgtgggatatttctcccacgtttttatttaaaattggtatttcatagcttaagagtttaattattttgtgcattctgaacatcattttgagaaatgcctgtaagaattaagcatgttttgtcattaaagtcaaattctgatcaattcaaatttattcaacagacacatttatttaggatttattgtgtgttaaaaactattgtagacagacagtaggagggaatacaaagaagtagtgggggaggaagacatgtatttgttgttaggacagtatagtttgtgtgccacatataagaagaaatagaatgcttttgtgggggcacaggtgaggagtaccacttcaacaccacccaaatgagtaagccaaggaattcctgtggaaaagtgtatgacccttgcttcctgaagggtggattattactgagtcttagaaagataattctaactggggctgggtgctgtggctcacccctgtaatcccagcactttgggaggccaaggtatgaggagcacttgagcccatgaattcaagaccaacctggggaacatagcaagactctatctcttcaaaaaataaaaaaatcaaaatcaaaattaactgggcatggtgacacacacctgcagtcttagctacctgaggggctgaggtggaaggattgcttgagaccaaaaggttgaggctgcagtgagctgtgatcacaacactgcactccagcctgggtgacagagccagactctgtctctaaacaacaaaatatataaataagtaaataaaataaaaattataattaagaaacccattactttctctactataggctgccttacttacattttaagaaccccttttcaatatctagagcttcctatttccccttctagcattttctttacttgtgtactgatttcaggcccagtattttcaacacatggaatcaataatctgaccactccttattgctcttgcattttacaaaaggatctgaagaaacataagatgtttgggaaggaaaactttaattcctctttgctcttctgattgttacttaagtttctggaacctccaagaccaattaaaattatcagagaatctcagagttttgaacaataacagaattacatttactaatccttcatcccattcttcaataattcccatatctttctgctctccacactttactgttttctcttcttgttctaagatttgatcactctgcctataccaaaatggcagaattcttgggcatttcttaaacttctcaagtaataattgattcaaatgaagcatgaaaatagttttttaatctaatgttcacacttatccctaatacttagctctcacaaaatgtaacatcaaaattttcttgactcttgatatgttgcacagctacagctaatagtggagtaagaatgagaagtaggcaatgatttgggtttgtgtaatactgagttgtctattgataattcaatgaggactttaaaaatatatatatgcaaacctttctgtaaatgtgaacacgtgcatttctaggacaggttcatagcttttaccagattatcagaagagggctaagacaggaggaaagaaatgataagaatatttgaccagtataaatgatgcttacataactaatggtacttacttatgtatatggtaatgatttggatccatctctcatcaagtgctccttttcctctcaatgcttatttttcctcacaaatgttagtcctttctcttctactattcatgagagcaaatgcaggagccaaaaatttaggaaatccccaggcagagaggattagcaaatctgctgactttttttttttatatagttttctactttattcttctcttttattatactttaagttctagggtacatgtgcacaacgtgcaagtttgttacatatgtatacatgtgccgtgttggtgtgctacacccattaactcttcatttacattaggtatatctcctaatgctatccctccttcttctccgcaccccatgacaggccccggtgtgtgatgttccccttcctgtgtccgagtgttctcattattcaattcccacctatgagtgagaacatgcggtgtttggttttttgtccttgtgatagtttgctgagtatgatggtttccagcttcatccatgtctcaacaaaggacatgaacttatcgttttttatggctgcataatattccatggtgtatatgtgccacattttctcaatccagtctatcattgatggacatttgggttggttccaagtgtttgatattctgaatagtaccacaataaacatatgtgtctttatagcatgtgtctttatagcagcatgatttataatcctttgggtatatacccagtaatgggatggctggatcaaatggtatttctagttctagatccttgaggagtggccacactgtcttccacaatggttgaactagtttacagccccaccaacaatgtaaaagtgttcctatttctccacatcctctccagcacctgttgtttcctgactttttaatgattgccattgtaactggtgtgagatggtatctcattgtggttttgatttgcatttctctgatggccagtgatgaggcacattttttcatgtgtctgttggctgcataaatgtcttcttctgagaagtgtctgttcatatccttcacccagtttttgatggggttgtttgtttttttcttgtaaatttgtttgagttcattgtggattctggatattagccctttgtcagatgagtaggttgcaaaaattttctcccattctgtaggttgcctgtttactctgatggtagtttcttttgctgtgcagaagctctttagtttaattagatcccatttgtcaactttggcttttgttgccattgcttttggtgttttagacatgaaatccttgcccatgcctccgtcctgaatggtattgcctaggatttcttctagggtttttatggttttaggtctaacatttaagtctttaatccatcttgaattaatttttgtataaggtgtaaggaagggatccagtttcagctttctacatatggctagccagttttcccagcaccatttattaaatagggaatcctttccccattgcttgtttttctcaggtttatcaaagatcagattgttgtagatatatggtattatttctgagggctctgttctgttccactggtctatatctctgttttggtaccagtaccatgctgttttggttactgtagccttgtagtatactttgaagtcaggtagcataatgcctccagctttgttcttttggcttaggactgacttggcaatgtgagctcttttttggttccatatgaactttaaagtagttttttccaattctgtgaagaaagtcattggtaggttgatggggatggcattgactctataaattacttgggcagtatggacattttcacgatattgattattcttatccatgagcatggaatgttcttccatttgtttgtgtcctcttttatttcgttgagcagtggtttgtagttctccttgaagaggtccttcacatcccttgtaagttggattcctaggtattttattctccttgaagcaattgtgaatgggagttcactcatgatttggctctgtttgtctgttattggtgtataagaatgcttgtgatttttgcacattgattttgtatcctgagactttgctgaagttgtttatcagcttaaggagattttgggttgagacaatggggttttctaaatatacaatcatgtcatctgcaaacagggacaatttgacttcctcttttcttaattgaataccctttatttctttctcctgcctgattgccctggccagaacttccaacactatgttgaataggagtggtgagagagggcatccctttcttgtgccagttttcaaacggaatgcttccagttttttgcccattcagtatgatactggctgtgagtttgtcataaatagctcttatgattttgagatatgtcccatcaatacctaatttgttgagagtttttagcatgaagggctgttgaattttgtcaaaggccttttctgcatctattgtgataatcatgtggtttttgtctttggttctgtttatatgctggattacatttattgatttgtgtgtgttgaaccagcaggatgaagcccacttgatcatggtcaataaggtttttcatgtgctgctggattcgctttgccagtattttattgaggatttttgcatcaaagttcatcagggatattggtctacaatactcttttttttgttgtgtctctgccaggctttggtatcaggatgatgctggccttataaaatgagttaggggggattccgtctttttctattgattggaatattttcagaaggaatggtaccagctcctccttgtacctctggtagaattcggctgtgaatccatttggtcctggacgttttttggttggtaggctattaattattgcctcaatttcagagcctgttattggtctattcagggatttaacttcttcctggtttagtcttaggagggtgtacgtgtccaggaatttatccatttcttctagattttctagtttatttgcgtagaggtgtttatagtattctctgatggtagtttgtatttctgtgggattggtggtgatatcccctttatcattttttattgcatctatttgattcttctctcttgtcttctttattagtcttgatagcagtctttcaattttgttgaccttttcaaaaaaccagctcctggattcattgattttttgaagggtttttcatgtctctatctccttcagttctgcactgatcttgttatttcttgccttctgctagcttttgaatgtgtttgctcttgtttctctagttcttttaattgtgatgttagggtgtcaattttagatctttcctgctttctcctgtgggcatttagtgctataaatttccctctacacactgctttaaatatgtcccagagattctggtatgttgtgtctttgttctcattggtttcaaagagcatctttatttctgccttcatttcgttatgtacccagtagtcattcaggagtgggttgttcagtttccatgtagttgagtggttttgagtgagtttcttaatcctgagttctagtttgattgcactgtagtctgagagactgttggttcttatttctgttcttttacatttgccgaggagtgctttacttccaactatgtgcgacgtggtgctgagaagaaagtatattctgttgatttggggtggagagttctgtagatgtctattaggtctgcttggtgcagacctaataagtttggaataagtgcgacgtggtgctgagaagagagtatattctcttgatttggggtggagagttctgtagatgtctattaggtctgcttggtgcagagctgagttcaattcctgggtatccttgttaactttctgtcttgttgatctgtctaatgttgacagtggggtgttaaagtctcccattattattgtgtgggagtctaagtctctttctagtctctaaggacttgctttatgtatctgggtgctcctgtactgggtgcatatatatttaggacagttaactcttcttgttgaattgatccctttaccattatgtaatggccttctttgtctcttttgatctttgttggtttaaagtctgttttatcagagactaggattgcaactcctgcttttttttttttttttttccatttgcttggtagattttcctccatccctttattttgagcctatgtgtgtctctgcacgtgagatgggtctcctgaatacagcacactgatggttcttgactctttattgaatttgccagtctgtgtcttttaactggagaatttagcccatttacatttaaggttaatattgttatgtgcgaatttgatcctgccaattatgatgataactggttattttgctcattagttgatgcagtttcttcctagcatcgatggtctttacaatttggcatgtttttgcagtggctggtgctggctgttcctttccatgttcagtgcttccttcaggaactcttgtagggcaggcctggtgtgacaaaatctctccgaatttgcttgtctgtaaaggattttatttctccttcacttatgaagcttagtttggctggatatgaaattctggggttgaaaattcttttctttaataatgttgaatattggcccccactctcttctggcttatagagtttctgccgagacatctgctgttagtctgatgggctttcctttgtgggtaacccgacctttctctctggctgcccttaacattttttccttcatttcaactttggtgaatctgataattatgtgtcttggagttgctcttctcgaggagtatctttgtggcattctcgtatttcctgaatttgaatgttggcctgccttgctaggttggggaagttctcctggataatattctgcagagtgttttccaacttggttcctttctccccatcactttcaggtacaccaatcagatgtaaatttggtcttttcacacagtcccatatttcttggaggctttgttcatttctttttactcttttttctctaaacttatcttctcacttcatttcattcatttgatcttcaatcactgataccctttcttccagttgatggaatcagctactgaagcttgtgcattcatcacgtagttcttgtgccatggttttttgtgccatcatgtcatttaaggacttctctacactggttattctagttagccatttgtctaatcttttttcaaggtttttagcttctgtatgatgggttcgaacttcctcctttagctcggagaagtttgatcatctgaagccttctctcaattcgtcaaagttattctccatccagctttgttccattgctggcgaagagctgagttcctttagagggtgagaggcattctaatttttagaattttcagcttttctgttctgtttctccctcatctttgtggttttatctacctttggtctttgatgatggtgacgtacagatggggttttggtgtggatgtcctttctgtttgttagtcttccttctaacagtcaggaccctcagctgcaggtctgttggagtttgctggaagtccactcccgaccctgtttgcctgggtatcagcagtggtggctgcagaacagcgaatattgctgaacagcaaatgttgctgcctgatcgttcctctggaagcttcgtctcagaggggaacctggccatgtgaggtgtcattctgcccctactgaggggtgcctccccattaggttactcgggggtcagggacccgcttgaggaggcagtctgtccattctcagacctcaaactccgtgctgggagaaccactactctcttcaaagctgtcagacagggacatttaagtctgcagaggttcaagtaatgatgaaggattgcataaaagatatttgagtataggagaaaatgtaatattaatgttctattttaatcgcctataatctctcaataattcaagtacacttatgagagatcattcacccctccttgtcatctccacaatcccttctctcccaacaacaccaccatgccattgtggatattgtccttccattgcaggcaacagacaaccatcttgtaaatacatattccataccacattccactcaaggtgctcagatcagatagaatgaagtaagaagatggtgatatcttagtaaatacacttgaacataagccttcacatttacattaatttcttccttaacatcagccacctgaggctgagtcattcctcaaaatgttagcagaacttctttagatcttgtttagtctcattaatataaagcaaaggttctcaatgctggctgcacattaaaataacctgggggctgggggcagtggctcacgcctgtaatcccagcactttgggaggctgaggcaggcgggttccaaggtcaggagatcgagaccatcctggctaacatggtgaaaccccatctctactgaaaaaatacaaaaaattggccaggtgtggtggtgggtgcccatagtcccagctactctggaggctgaggcaggagaatggcatgaacccgggaggcggagcttgcagtgagctgatattgcaccactgcgctccagcctgggagacagcgagactccgtctcaaaataaataaataaataaataaataaataaataaataaataaataaaataacctgggaaaatttgaaattactgatgccaatattacaacctgaagattctgctttaaatatactaaagccatggttcttattccaggctatccatcagaatcacctgtgggtgtttttaatgatctacatgcctgttctctatttccagatagctgaatatgaatctctgacatgtgaactccctatacaattgtagtttccaatactttgcaagtgattctaatatagagtaatgggttgagtctcattactccacattcacacttcctcattggtccaaaataggaagcccagctctagtcaatggaataacttccacatggtgtttagttttttgcaaaaattaatcactcaacattttaaaaagaatttgtcacagactctaacatatagcaaaaacaaaaacgtggccttggagtaaatcaatttataatccttttatgtgatttcttttgagtggccaacattttactgtctgcaaatagatattcctaatcactatgccctggtctgaagttttcaaaattacccaaagtcgtgaatgctgtgaaatatatatggtttccttcacaaaatatatcataggatatgagtggacaagaacaaaaccacatgaaagtgtacgtgcaggcagttcatccaggattactcactagcaaacaaaaataaaagctgacatttattcaacaattattatctgtttaaaattttctgacaaccttgtaagcattataaaatttaattcttatgactgccttctaggataggtattattgttattcccaaatgacagactgggaaaataaaaattaggaagcttaagtgatgcttttgcttatcagcttcatagaactgtgatgcctaagtaaaattacaaattactatatcgtagtgattttcacaataacataaaagtagtcaaaattatgacctttatgcctgtaaataccaagatttgcctgcttgcattctaatgaatatattaaatgaaagtctgttaacgctatcacataaatgcattgccttccaagcctaaaaccccatggtgtgaactttcccttccaaaatacattaacttttttggttctgttagtgcagctggtggataatacttaaaatggagttctaagaaaacagacagtgactcaatttctacagaacagtagactcatgtttaaacaaatacacacaaatttattctgcagtgacataatttattgttcaatgatttatcaatattatattattacaactgaatccatatggaccagaaaaagattattcacacaaatcacaaagatactgtggtaggtagaataatgggctcctccaaaatgcccatgtcctagtcctcagtccctatgaatatgttttcttacatggctaaagggactttataaggaccttttgaaggcagattatactgaattatctggataggccccatctaattacttaagtccttaagagtagaagaagataggcagaagacaatgtcatagtgatgtggcttggaaaggcttcaacccacttctgtagattttgaagacagagaaagaggccatgagccaaggaatgtgggtggcctctagaagctgctaaaggcaagcaactaatattctcttatagcctccagaaaggaacacagccttgattttagcccagtaagacctgtgtcagagttctgacctactgcacaataataaatttgtgctatttttagccacaaaattaatggcaatttgttacagcagtaataaaaagctaatacaaggcaaggatgcccacttttgccacttatgttccgtaaagttttggaactccaaattaggcaagaaaaagcatccaaattggaaaggaagaagtataattatctgtgtttggggatgacatgatcttgtatgtacaaagctccaaagtatctacaaaaaaagcgatgggatgcaaaaataatttcagtacatttgcaagatactacattaacataaaaagtcagttcagtttttgtacactaaaaatgacacatctgaaaatgaaactcagaaaacaatcccatttacagtaacatcaaaaaaaaagttaggaataaatctaaccaagagggtgaacatattcactgaaaagtgtaagacactgataaaagaagttaaagcacacacaaataaatggaaagacatctcaggtttatggatgagaagaattaatattgttaaaacgtccatactatgcaaagcaatcttcagattcgatccaatctctgtcaaaatcccaatggtattctttacagaaatagaaaaaatcttgaaattcatttggagccacaaaagaccccaaatacacaaaacaatctgaacaagaagaacaaagctggagatatcacactctcgattttaaaatatattaaaaactactgtgattaaaacagtatggtactggcataaaaatagatagatagatagatagatagatagatagatagatagatagatagatacacacacacatacacacaccccaatggaacagaatagagagcccaaaagtaattccacacacctaaatttaactaatatttaacaaggatgtcaagaatgtacaatagggaaagggtagtctctttaataaacagtattggaaaaactggttatttacaagcaaaagaatgaaattgaaccattatcttacatggtacacaaaatttaaatcaggtttaagacttaaatgtaaaacatgaagccataaaactcttagaagaaaacatagggaaaaatattcttgatgatggacaattgacttggcaatgatttcttgaatatgacaccaaaagcataagcaacaaaagccaaaatagacaagtgggattacatcaaactaaatacttttgcatggcaaaggaaacaattaaaaaataaaatgggaaccaacagaatggaagaacatatttgcaaatcatatatctgataagggattactatccaaagtatataagaaactcctaagactcaatagcaagaaaatgaacaatttaatttttaaaaaggcaaggaactgaatagacatttctccaaagacatacaaatgtcaacaggtatatgaaaagattctcaacctcactaatcattagggaaatgcaaatcaaaaccacaatgagatatcatcatatatctgttaaaatgactattatcaaacaacaaataaataaaagataatgagtattagaaaggaggtggagaaattggaacctctgtacattgtaggtgggaatgtaaaatggtgcagttgctgtagaaaacagtatggaggtgtctcaaaaaattaaaaatagaactgccatatgattcagcaatttcacttctgagtatgtatctaaaagaattggaatcaagattttaggcagatagctacatttttatgttcattgcagtgttgtttacaatagccaagatatggaaacaacaaatatgtccattacaaatgaaggatacagaaatttgctatatacctaaaacagaaccttaaaaaaagaaaatcctggctgggcatgttggctcacacctgtaatcccagcactttgggaggccgaggcaggtggactacctgaggtcaggagttcgaggccagcctggccaacatggtgaaaacccatctctactaaaaatacaaaaattagccatgtgtcgtggcacatgcatgtagtcccagctacaggttgaggcaggagaatcgcttgaacccaggaggtgaagatggcagtgagccgagatcgtgccactacactccagcctgggtgacagagtgagactctgtctcaaaaataaataaataaataaataaataaataaataaataaataaataaatactttcttaaaaaagaaaatcctgccttttgtgacaacttggatgaatctggaagacattatcccaagtgagataggtcaatcacagaaggacaaacactgcatgatttttcttacacataagatacttctaaaatagccaatggtatagaagtagacaatagaatggtgttaccagagaatgggagaaggggcatataaggagtttttataaatcttgtataaatttacagatataggaaataaatgagtttcagagatcttctgtaaaacatagtacctatgactaacaaaaggtcttatgtacttaaaattttttttaacagagtagagctcatgttaaatgtcaacacaagaaacaaaagaaaaaagggatgcaatgttggaattgcaaattataaatcaaaagaagggggaagtagataaggatatagatagggcagcattgcctgcaggttggagttgagtgattggggttcatcataatattgtatctgtttttatgtacatataaaattctccaaaaagtgaagttttaaaaaatactacaggttagaaagattggccatatattttttacttgatgccaaatttaaaggacagttggaaacaactaatttttccctatgaattgatacttctatctgtcctgtccattttattttccctgtcacagccatccgagttcagatattcattatatggtccctgggttcctgcaatcaactcctacctaatgccctttacttcattcaacatctccccaaatccatctctctaccacagtcactctagcctttattattccattcaaacacacatatgctattcaagggtattctgtatgcaaattgatttgctctacttttaaggttttccatcgtttagtccagactatttatttcactaccctctaacccaacagatagtagaaagcccaatctctttactcgtctaaaaaatgccatgttcattctggttgtaggtggctaatccttctctcttcatgcattccaattctaccagccttttaagactgattcatttccctgaatgattgttttatttttcgatttcaaataaatggaaaataaaagatatatatatatatttatattttaatctttaaaaatacaaatacagtatacatatgtaatatatatcttccaccttagtaactctatggtatttatttaattggaccaacttaataatgtcagttactcaggaactggtcatttgaatattcataatgaaaggacagctctttgtcatctcaaaactagtttttggcattaaatctaaaccaagtttggtaaatgctacctttctgaggtgttgtttggggtagtggtttgatttttggttgtttcaaagcatttctaaggatgtacaactaaaagataaagacattggaaaatataagatggttgttctttctttctctcacagtttggaatccagtgtcttgagatgcatttggttactgtagactaaagctgcctagaaactggtgagctggctggctccctcagcatttactctgcagtcattgtcccttgtacaacgctttccataaagccctgcttgtgttaacctcaaaggaatgcagtttgcctggggtcaaggcctccacagcacatccatgaaaatcagcaatgtgatggggtatacaatatcaatctacagagcaatacaagggccccttgataggataaacaacatcttaggtccagggcatcatgagattcagggtaaaattgatttctacttaaaaacatattcacattatctaatagagggtctctgttcccattaaattttttcttcagccacagtattttttactttaaaaaccctaaatattgtagtactttaatttttcttgggttaaattagctttctatatatatgtcagaggcattcaaaccagagcaactccattttgaatgagggctaggaaaatgaggctgggacttgctgagctgcattcttagaaagttaggcattcctggcctccagatgtttgcagttaagggaacaaactaataatgtttattaaacagactcagacttaggagtgtccacatatcccaatatctggagaacagaagcattcctaattttgctttaaagataataacactgatttttttgcaaaatatagtaatgaagaaacttaatcctttatcacaaacccttgtagcagagcacatctcccccacatatataagcactgtagccagggtggatgcattccttctcctactttcgggaacgtcctcctcttgtctatggagtagctgttctttcaccactttactttcttaataaacttgcttttactttgcgctccctaaattctttcttgcatgagatccaagagccctctcttgggatctggatcgggacctcttccctgcaacatttctggtgaccatgaagggattgcagtggggaaacccccgacccaaaggctaattttgggtaagtagggttgtccggtaacatatttctggcaaaccaccaaatggatgatactgaagagaccccgaacccaaaggaaatagactgcagcactgattggacgactttgggtaagtggggtgcatacttgagtaaagaatgggattgggttagaggcccaatttaggggagttacagtctctcctaaagactaagagggttaaagcctcctctcaataaaaggcacggacacttgacagaccttgggttagaggcccaacttgagaggttagaatcacttctaaaatttaggggattagaagcccctctcagtaaagtcccttttggctaagaacgggtttgacaccacgggctatgctgttcgtattcatcagccttgttctctttgctgcaccaatcaatttcttggttgctgtctctgtttcactgtcattttcaggagactttacttaactgtatttgaacttattcttctcctgtgcccctcccaatttctgtccattagtttgtgaaacattgggaacaaaaagcattgaaggctccatctctaaaattgctgattgagatttgatatttaacagctacagccaataagattagatagatgtggttatgttttgttgtcactatgctgactaggtgtgattgagaagcactaagatggtaatcgggggacttttctccttgctgttttgtttcattttgcaaactgaaaaaacaaaacaaaacgacaacaaaaaaaacacttctttccttcttagattcaggcagactggctttgcttatccaatccaccctactgctattgcccaaaacctgcttgctctggtcattcccatctaaatccttctcatttcccttgccttattaagcatttttgtcaaagtccatgttgtggtttatctaagattcatggctcagctcacctatattatttgggtaatgtgaataagagaattcaattttcgacagggatcccctcattaatgtagctggccttaaaaacctctcttatcctttttagtggaacttggccagtggcaatacaatctcgcaggtttggaacttttctttcaaaaatcacctgcctccttcatgggaaccgtggcatcaattccaaagaactcaccagtaggatgtattcttgaacactgggaccagattaaactgaatgggcttaagatgagaaaactggtgtttctatgtaatactatttggccttgttattatttgtaaaaacaagagaaagagcctcctactggaactacagtctttaatactgcacttcaacttgatttgttttgtaagctggagggaaactgggatgaaataccatatgttcgagcatttttgctgctcagtcaggataaaaccctgcagcaggtgtgtgcatgcttgatgagaggtaaagaagaaaaagagctagacatactaggtgattctttaatgcaaccccctactgccccagtttaggggcacttttgggtggagcagagcctccttctgtcagctctgaaggttcagatgtgttggtcctttctcccttcagcccacctgaatgttctattggaaacccattgtcccctattccttacccatctagtcccacactatacccaccactccctgaggaactcagcccagcaagtactacttgtagtggagcctcctatcaacctccaaagggaaacctttgtccacttagagaggtgacaaatggggaagaagtcactgtgagagtacatgttcccttttctatgtctgatttggctgtatataaagaggagtttggtcatttctctgaagacccgggaaaattcatagataagtttgagaaattaactctgacgtatagtttaacttggcaggatctgcatgttttattgtctctgtgttgtacagtggaagagaaacaacacattttgggggcagctaggacccatgcacacgaggtattggcttgcaacccaaaccatgatatatatcaggcaggaggtatagcagttccagatcaagatccagagtagaactatcaaagggacagtgaggacttggggaggagaggttatatggtcactctttggttggaagggatgagaaatgtatgaaaaatcctgttaactatgggaaggttaaggaagtttctcagggcaaagaggaaaatctagttttgtttcaagggcatttagttgaggcaatcctgtgctttgtgggattactcacagatcctgtgctctgtatctgcccctttaacatgctggtccaattgtctggaacactgtctcctgcctacctgccaggtaggttcatatttggccttcaagacttcaagcattatttcagtagctttttttctttcatccccaagcggacttagataccttggtttccgtgttcccacagaactcagtgtgtcaattaaggtctaaggctgagttgaagtggaagagatttactggggtaaaagtttttggaagacaaagggcaaaaggtgcaggagaaagcaagtagaggctacagactgtgatgcatgtctaaaacctataagaagatagagtaaaggtggacaagtctcaaactgcagtgcgaagtcttggccagacaacagggaaccctcatctcagactgccgtagaagaacttagcattgggcagtaccaagctctatccattctgctatgttcagtcattaacaagggctgtccagaaagagtgtagcatcagcacaaatgaatgctacaagagatcctgaatttgctgcaactggaatctgtcacctaaattccctccttgttgtagattttctcttgaagagaaatctaagtgacatacctgtgtggctgcatattctgtaatatcatagactgtatattgtcactcattgtttacttatctttcttaatcctgaagtgccttaaaaataaactaaattttaaaaatcagtgatcaatttaaaagtatttgttaatttttgagatgtgtagacattatcttacaaatcttcatatttgcagataaatgttaagtaagcgttttccaaataaatgtgtgaataaattaacacaagaaaaagcagtgcagcaatcttttatgttttacttcccaaggtattttctttagctttgtgagaacatcataaaccattaagaaagtatattttctactatgacttccctttgtattaatttcatctcaccaactaatagctgtggaattttttgcagtaaatggtagagaagggacgctacaagtcttgagttggaataaaagaaacagaatatcaatattcttataataaggatatcaaactcatgtgcatgtgagtacaatagctattctaaaccttcatctcattcttcactccattcgacagccttgataagctcccatttcactgagaaactaaagccatctatcaggtgtgaatttcaggtctcctcaatgtccatcatccatttgcaaagcctcttaaagaccactagtatatgaaaacatggagaattgtagacgtatcagatattaagcaccttaccatgtgccagtatggtatcaaatgtagtaccaagcactgcactgtgcaattctccccaagctcaaataaagacatggatctcagggaggttatgtgttaatccaaagccagattctatttttagagcaaagatttgaagctgactttattttactatcaaactcatgcacgttaacccataacatcattaactctagctttaaaattcctctttgaaaaaaaaattcctatttgatccccaaggaaatctagttcaatcaaaagtaaatctatcttcaaccttcctagaagacttttgtctagcacatcagagacttttgggagaattggactgaatatacttcagaggtcactctgaaggcaaaattgtttgaatatgacttgtaaggcaccattaagtaatctaattaaggcttagatattttaagaataaaagcaggtaactattttctcacaataattacccactcccttctaattgctattgagagagttaaaagttcaccatatatatttgattgagatctatttagaaagtttcatagagcacagggcacggtggttggcacctgtagtcccagctacttgggaggctgaggcaggaggattgcttgaggccaggaggttgagaccagcctgagcaacatattgagaccctgtctctacaaaaaaaaaaaaaaaaattaattagctgggtgtggtggtacgcacatatagtcccagttgctcagaaggctgaggcaggaggattgcttgagcccaggagctctgcgctgtaacatactatggtcatcgggtgtctacactaagtttggcatcaatatggtgagcccccaggagattgcctaaggagaggtgaaccagcccaggttggaaacggagcaggtcaaaactcccgtcttgatcggtagtgggattgtgcctgtaaatagctattgcactcatctctaaaaaaaataaaaataaaaataaaaagacaaagtttcagagagctaaaatgaatttgatttatcttttaagatgttgaggccaggcacggtggctcatgcctgtaatcccagcactttgggaggccgaggaaggtggatcacctggggttgggagttcaagaccagcctgcccaacatggcaaaaccatgtctctactaaaaatagaaaaaaaaaaaaaacagatgttgaggtggtcatccaataggaaatctaataaaaaccaacctctttatgtttagatgattgcaaaaacagtgccaataaaatgataattagtattttagtgataatgattagtgatcattattactttatatgtggtcattataataaagggctcaaataagtccccagtttaaatatacattcttcaatctgttacacttagtgttatgagcaatgtcaacattaacagtaacttgctgtttagaaaagcttatttaattaggctaaggcttttgaaaaacagtcatagatttcattcttaatcctgtacccccataggacttgtttgaaatttttctcaagtaaatacttgctttaaagaaccatttctcacccttgccccttggaagtgtggaaataaatcatttgtataaacttgaaactgtctagggtgatttttatggaaataacaatggcagttcaacaatggaagtgagggtgggagtacaaactgttataaatacatcactaataacgtcagtgtatttcccttgtcttccacaactatctctggggaaataaaaacactgttacatgctcacttgaattcctgtcattgtgctttgtggatcagtctctctagtctcaaacttgcagcctgtggctgaggttatcatctagcctgtcacatggagccaccaacatagagttgaaatcactggaaatgggtttttttttctcttataatagaaaaggcaaatgattcatgagctcagccacaaatcagagtgaacgaaaaacaactgggtagtaaggcaaatcttagctgcaaaactagagatttccaaaggaaactatattaaatataaaccttctgtataattgtatttgtttcaagcttctaaaccattgaaagtaatgacatagctagctttacaccatgccaaatgcatccattccttccgtatctcctctgtacccttttccccccttccctctcatcctctaacattcaagagaaaagctgaagacagcaaaccccagaatgggattctatactatagaatataggtgtagcttatcctaggagatttttggctttttctttagataactgttctatagagaaacaggtgtgcaatttatctacacttctgaatttactttctgtggtttttctacacgtatatcacagttcggatacttgtgacttttaagggaatcttattttgtaattattcatgcctcagacatgagacaggattcacggcatggtaaatttttcaaggaatactgaacaatgccaaacggtggcaaagcctgactatctttgtgtgataatacccacatctgtgtcacatctgagtctgattcagatacctgctttgtctcttcggattgtgtgttttttttgtttttttttttttttttggttttttgcatggcttagagtattttcttgaaagctggatataatgtatcagataataggaactaagggaaataggcctttagtgtgaggttttatattaatctgtttaggaatttagctgggcttaatatttgctatagctgtaggtgccagaggcttccaatttttctagtgtccttatttttatgtcttttgttgatttaagccttccgtaagtacaattcctcagagagactctcagtcctgcagccctctcagctacaagtcattgtgaaactggaatacagtttatgtggcttctgctccaggtaagcagatattggccaggaccctggatttgcctttcgctccagattttgttgtgaccatttttccctgtgatctcagttctctgataggtccaagaaaagttgttaattttcagtttgtctcacattttcttgttgtaagaatgggaatgacgacttccaggccatttacaaaatattggtgcacacaccagaagtccacatcactgtcttgggaatcagtgaacaggttcacttatttgttcaatcaaaaagaatctaagtgattgcccaaaatcttcctagagttttagtttagtaattgtcttggattttttttagcaatagcaagaaagttctgtatattttcacaactaaaaataaaatcagcagtaccaaaacataaaatgtacacatgtacacctcagtgaagccatgcaaccctgagactgaaattgtcaacataggacactagtaccgctgccacctgtcataatccaacatctttgtaacataaagggcattgagttcacagtaactctaaggtatttacacagtcattcaacagctacaccccctccaagatttcacacttggaaatttccctaaaaaaacacaattacctaccaactcttccatttctttaccccaggcatccataacaaaagtgttttactactaactttaaaacttttctcccatgtctatttgttaggtgaaattcatcttagcttctgggattggctcctactcaacatgcaagcactaatcctctaacatgcaggtaaactggacaacttgctgttcactgaaatatgccttggaagctttattcatgcagcttccactgcctggaaacactactccctccattctgcctttagaaatcctgttcattttttttaaattaatgataagaacttcacaaattatacctaactctatgtgagagtttctatctttgaactatacagctctttatgtacgcctctattatgcatttactatattctgacttccgttggaatttatgtgcacctatttatctcctctagtaaatgatttctaatttcttttaggctgtagcttatacatgatgcctatacatggttaaaaaaaaaacttgtaaatataatgcatgaagggaggagatcaagtttgttttgggagcagtgagttactaaagttcattcaattatataaactcagagtttataggaatcacacacattcaagacaacatattagatagatgcattcagggtataaatgttacttataaccaggcccttatgttagattggttcaatattcaagaccaagaatcttctaatgcactttgagcaatattccccatagagcattattgcttacactgagcctcattggccatctttatgtctggtcatacaacctggtaaagcttccatgaaatctgtattttatcatccagaaaaaaacatggagtttgagattttaatgattttactttgcaatttgtcctccagaatgtttaaaggtgaaacaagacttagcacccccatgaacttctctatgtagattctgttaagtggtcatttcgcttgactataactacctcaagtattgaggctttactttcctgggttttctgaaatttcctttatctctcccaaatttatttcaatatgaaagaaaaggactatattatagaaagttagcaaagtgctggtatctgaatttgtaggttaaaattttctagaaaaatctatttacttatttaaaaaaaagaatatggcacctgaactcagaagtgtgggtatatttctgattgctgaagtcagtaaacaaaaaatgaaggtgaaaaagccaatagaagagaaactaagataatgaagaggaagttgaagtttccatgaggaaaggccaaaaacaattagatttcataagtcaagaatgctaaaggctgaaatgaggatgacataaaaacatataaaaccattaagttattgagtacagcatacctagctgaatgattagattttaaaacaataaaactagggaatatctttcgaagtttagttgaaatcagaagcagtagtacttacgggatgcttaaacaggcagttacttcagtttgtaaggctacatgacatttaataggctaaagcagagtttcagtaaagcaatagctaagttctaaggattataaagagagagatgaaatgcatgagtatatgagaaacctccatcattaatagagattatccataacatttagacttctttaatgtcatgggtttcaacaagagttgagactctacgtgagcatttaacaggatgagatacataaattctaatagattcaagtctgtctgtgtaccagagataatttaggtaagtcaattactatatccacacagcacatattgctctacaggaaagggttttatacattttcaggcaatttaaatcaaagaatagcttttatggaaggagacaatagactctgactggaatgtaatgactacaatatggagaataacttaagtcaggaattgatttctattttagactgatattgccttaaatggcaggctaaacgtttctgtcaaaaagagaaattttattctagtaaaaacaatttatgatgtattaggcagatctttgcaaatacataatattccctgaactaatattatccattactataagtagagggaagtactttaagaataattgaatctgttaagaaaaagcctatataatttagaaaacaaataataatcgcttaagaacaatgttcttgaaaatgcttcttttctctatttcatttttttcattgatttgaatcagcagcttatgagtcatatagatatttttaattaatagaaaaattataaattatgtagttttatctagatgttagatatgggtaaatacagttatttctaaggttgaataaattattgtttgcatattgccaattggcctttatttggtgtaaatattgctataaatgattcaaatcgtctcccttattaattgggtgcaatgtgatgcaatctaagaaaagacgaaatattatgaaaagtctgtttggcatatctgagaagtatgtataatctagtggctaatgtgtgggctctggatttaggtttcttggcttcatctctgcacagcttcatttctgtgcaggcttaggcaacatatttaacctctttccctctaaaatgtttcatctggaactaaccatctttcagcgttgttgtgaagattaaatgaggtaatacagaacaccagaaacaaggcttgtttgtaaacactttataaatgtaagatattatttttcaagttttttcctcttcataatataataccaaacagtaaggaagcactttatgaaataatgtttaaatttttttttcccagacaaggcttttatttcagggattgtgctcaagtgcaagggagacagcagagggaaggcacaaagattcaatagctggttccctgaaaaaggtggtagggattttatttttgtttagacaaagcacaagaattgacatcagaggtaagcacatgacaggcagaacatttgcaggtcagcatagctggttgcagtggttaataatgtttaaattttatcagactgcttcataatactgacaaagccttctattcttccatctctctgcactgatgtttatgaatagtaacaaaatactaaacatctcctataactccttactcaaaatggtactgtatataactcagtattctcgacaaggcttttgctttatttaagcattagttcaacaaatgttgagtgaatatttattatgtgccaaacagattccaaaatataaaacaactgtccctgtcctactgtccaacttagaaaacttccatcaccaccactcctcatccttttgaaaaagtgttaaaccatcgttctgttccacctttccaatggcctgtgccccctcatttaacctgttaagagaaactgcctcatctgtaaaatagatatgaagctgctgtgaggaaaatgagctagctaatagagaagaaccttgtgaacttatgaaagtgttagttatttgataaatcactagaagaatctggtcattatgtaagttaaagagtagatgatagtgcaatacaagtaactgtggctccttgtgaactctggtcatttacatttatttcctcagaacagagaatagacaaaccaaccataccatcccttcccttctagtaagacttttagaaataattatgagtgcctattggtagttaaaaaaaattatccaatgactttcttaattcttatcacactgaacctctggactacttcttgaatctcttccctcccttggcttctctgattcttctcttttttatttgattcttccttctcagtcttttaacgggatagtttctttactcactccctgtacaaattaattgtggataattcccaaatatgcatctgtgtctaagaactatattatgagcttcaggctcacatttccaggtttcaaccagatatcacacctaggtatctcccaggcatcataaattaaactagaccaaaactgaaatcattgtagctttccaaaaatttctaggattcctgtcttaatcaatagtataaaacatggatccatgccagaatggcatctaggatcctgttcccatccctttcaactcgcacacagagaccacatcttgtgaattctgaatcataaattatacgcttaacctccttccatctccccttcaaatattccaagccaaagtctctttatcttgctcatagactgtggcaattttaacccaactgctctttgtgcatcatgacctacacacacacacacacacacacacacacacacacacacacccaattcatcttttccttggctttgaatgagattttctgacaaactaatctgttcataacacgcagtgtgagtatacatgcttctcatgcctaagaggtaaaccacagtcatcttaagttggtgtattagagcttcctgtttctccacgtctactttgccagacttattgcactaaaactccatcttctagttgccattccaggcattctgagattaaatttcccaggaagatgagagggttttatgtatttcaaaattttatgaaggtattccatttttctgaaatcccctatctccatttttacctggagaacatctactcatattttatagctgagccccattatcaccttctctatgaaaaaaaaaaattaaactcttctctaggttaaatttaaccatttcctcttttatgtcttccctctgtccttttcatatctttaccacacacctccaatgaatctcttatagtgaagctcatatgtcattcctctttgttcattcaacccccagtgcctagaatagcacctggaatacagtggttaattaatattcttcgcttgcacaaatgtctgaataacttaacaaatgaataactgtattaatagtgaatacaaccatgacatgaattttataagaacatgggtctgtacataagaatttttatttttattttatttatttatttatttatttatttatttagagacagagtctcactctgttgccaggctggagtgcaatgatgccatctcgactcgccgcaacctccacctcccgggttccagtgattttcctgcatcagcctcccaagtagctgggactacaggcacgtgccaccacgcccagctaatttttgtatttttagtggggacagagtttcaccatgttggccaagatggtcttgatctcttgaccttgtgatccacccacctcagcttcccaaagtgctgggattacaggcatgagccactgcgcccagcccatacataagaattttaagtccagcatgctaccataatataaaaaacatctaggaaagagaatcagatattttcgttgagtgcttacaatgtatgaatcctttagcatcattatctcatttaatttgcaagcaatttttaagataggcatcatggaacacctacaacatgcaaagcagttttcattcatgacttcatttaatcttcccaatgaatttatgaagaaagtattattttggcaaatacacacatgacaacactaaaactcaaattagagaattttctaaagatcaaacaagtttaaagtgccaaatttaggattccaactatttctctgtgtcaggcctttgagcccaagctaagccatcatatcccctgtgacctgcacgtacacatccagatggccagttcctgccttaactgatgacattccaccacaaaagaaatgaaaatggcctgttcctgccttaactgatgacattatcttgtgaaattccttctcctggctcaaaagctcccctactgagcaccttgtgacccccactcctgcctgccagaggacaacccccctttgactgtaattttcctttacctacccaaatcttataaaatggccccacccctatctccctttactgactctctttctggactcagcccacctgcacccaggtgattaaaagctttattgctcacacaaaccctgtttggtggtctcttcacactgacgtgcatgaaatttggtgctgtgactcagatagggggacctcccttgggagatcaatcccctgtcctcctgctctttgctctgtgaaaaagatccacctatgacctcgggtcctcagaaccaccagcccaaggaacatctcaccaattttaaatcgggtaagtggcctcttcttactgtcttctccaacctctctcactatccctcaaccactttctcctttcaatcttggtgccacccttcaatctctcccttctcttaatttcaattccttttattttctgttagagacaaaggagacacgttttatctgtggatccaaaactccagcgctggtcatggacttgggaaggcagccttcccttggtgtttaatcattgcagggatgcctctctgattattcacccatgtttcagaggtgtctgaccacgcggggacgcctgccttggtcattcacccttagcggcaagtaccacttttctggggggtaagaaccccccaaccccttctccttcacccttagcagcaagtaccacttttctaggggacaagaaccccccaaccccttctttctgtgtctctaccccttctctgcttttctgggggcaagaaccccccaatccctaatttccataccccgacctcttatctctgtgccccatcccttatttctctgctgtgacctctaatctctgcgccccaaccccttatttctgtgccctgactcctttcccgcttttctggagggtaagaacccccggaccctttccctctgtgtctctactctctcttttctctgggcttgcctccttcactatgggcaaccttccaccctccattcctcctgcttctcccttagcctgtgttctcaagaaattaaaacctcttcaactcacacctgacctaaaacctaaatgccttattttcttctgcaatgccgcttgaccccaaacaaacttgacagttgttccaaatagccagaaaatggcactttcaatttttccatcctacaagatctaaataattcttgtcgtaaaatgtgcaaacagtcgaaatgcctgacatccaggcattcttttacacaacagtccctccctagtctctgttcccgatgcagctcatcccaaatcttccttctttccctcctgcctgtcccctcagtcccaacctcaagcgtcactgagtctttctaatcttccttttctacagacccatctgacctctcccctcatcgccaggctaaggtaggtcccaattcttcctcagcttctgctcctccaccctataatccttttatcacctcccctcctcacatttggtccggcttacagtttagtcccacgactagctcttcccccacctgcccaacaatttcctcttagagaggtggctggagctgaaggcatagtcaaagtacaagtacctttttctctatcagacctctctcagatcagtcagcatttaggctctttctcatcagaccccattaaatatatacaggaattccaatatctaactctgtcctacagtttaacctggagtgacttaaatgtcatcctgacttctaccctctccccagatgaaagagaaagagttttttctctagcccaatctcacgctgataaccgctggcttcacgagtcagacctccaggaaggcattagagcagttccctgagaggatccccaatggaactatcaggcaaattccccaggtatagctagacaagattacatgatttcctgcctagtttgagggcttaaaaaggcagcttacaaacctgttaattctgacaagcttaaagaaactacccaaggtaaagacgaaaacccagcccagttcagggcccacttagcagcaacccttagacgctttaccgccctagacccagaaaggccagaaggccgccttattcttaatatgcattttatcacccaatccactcctgacattaggaaaaaacttcaaaaattagaatctggccctcaaaccccacaacaggaattaatcaacctcgccttcaaggtgtacaataataggaagcagccaaacggcaatgcatttctgagttacaattacttgcctctgctgtgagacaaaacccagccacacctccagcatacaagaacttcaaaatgcctaagctgcacacgcctaagccgcagcagtcaagcattcctacaagacttcctccatcaggatcttgcttcaagtgccagaaatctggccactgggccaaggaatgcccacagcctgggattcctcctaagccatgtcccatctgtgcaggaccccactgaaaatcagactgttcaactcacctggcagccacttccacagcccctggaactctggcccaaggctctctgactccttcccagatcttctcggcttagcagctgaagactgacactgcctgattgcctcggaagcctacaagaccatcacagatgctctaagtaattctcacagtggaagataagtccgcccccttcttaattaatatggaggctacccactccacattaccttcttttcaagggcctgtttcccttgcctccataactgttgtgggtattgatggccaggcttctaaacctcttaaaactccccaactctggtgccaacttagacaatactcttttaagcactcctttttagttatccccacctgcccagttcccttattaggccgagacactttaattaaattatctgcttccctgactattcctgggctacagccacacctcattgccgccttttcccccagttcaaagcctccttcacatcctccccttgtatctccccaccttaacccacaagtataagacacctctactccctccttagcgactgatcatgcaccccttatcatcccattaaaacctaatcactcttatcccgctcaatgccaatatcccatcccacagcatgctttaaaaggatgaaagcctgttatcactcacctgttatagcatggccttttaaagcctataaactctccttacaattcccccattttacctgtcctaaaaccagacaagccttacaggttagttcaggatctgtgccttatcaatcaaattgttttgcctatccaccccatggtgccaaacccatatactctcctattctcaatacctccctccacaatccattattctgttctggatctctaacatgctttctttactattcctttgcatccttcatcccagcctttctttgctttcacctggactgaccctgacacccaacaggctcagcaaattacctgggctgtactgccgcaaggcttcacagacagcccccattacttcaatcaagcccaaatttcttcctcatctgttacctgttttggcgtaattctcataaacacacacatgctctccctgcctattgtgtctgactgatctctcaaaccccaacaccttctacaaaacaactcctttccttcctaggcatggttagatactttcgactttagatacctggttttgccatcctaacaaaaccattatataaactcacaaaaagaaacctagctgaccccatagatcctaaatcctttccccactctttttcattccttgaagacagctttagagactgcccccaccctagctctccctgactcatctgaacccttttcattacccacagccaaagtgcagggctgtgcagttggaattcttacacaagaactgggactgcgccctgtagcctttttatccaaacaacttgaccttactgttttgcttagccctcaagtttgcgtgtggcggccgccgccgccctaatacttttaaaggcccttaaaatcacaaactatgctcaactcactctctacagttctcataacttccaaaatctattttcttcctcacacctgacacatatactttctgctccccggctccttcagctgtactcactctttgttgagtcccacaattaccattgtttctggcccagacttcaatccagcttcccacattattcctgataccacacctgacccccatgactgtatctctctgatccacctgacattcaccccatttccccatatttccttctttcctgttcctcaacctgatcacgcttgatttattgatggcagttccaccaggcataatcaccacacaccagcaaagccaggctatgctatagtacaagccaccagcctgcctcttagaacctctcatttcctttccatcatggaaatctatctcaaggaaataacttctcagtgttccatctgctattctgctactcctcagggactattcaggcccccccccccctttcctacacatcaagctcagggatttgcccctgcccagaactggcaaattgactttactaacatgccccaagtcagataactaaaatacctcttagtctgagtagacactttcactagatgggtagaggcctttccacagggtctgagaaggtcaccgtggtcatttcttcccttctgtcagacataattcctcagtttggccttcccacctctatacagtctaatagcagaccggcttttattagtcaaatcagccaagcagtttttcaggctcgtagtatccagtgaaacgtttatatcccttacggtcctcagtcttcaggaaaagtagaacggactaaaggtcttttaaaaacacacttcaccaagttcagccaccaacttaaaaaggactgcacaatacttttaccactttcccttctcagaattcaggcctgtcctcggaatgctacaaggtacagcccatttaagctcctgtatggacactccttattctctctagtcatactcctattgaccgttctcaactacgcatacatgccctgctcttgattacactgatggtttacgctgcttctccaagccatcacagctgatatctcttggtgctaaccccaaaccgccactcttaactcttaaagtaaataaataatctttgctggcaaggctatgctgaacctccttaggcactctctaatcagatgtcctgggtcctcccaattcttagacctttaatacctgtttttctccttcttttattctgtttagtttttcaattcatacaaaaccgtacccaggccatcaccaataattctaaatgacaaatgtttcttctaacagtcccacaatatcactccttaccacaaaatcttccttcagcttaatctctcccactctaggttcccacgctacccctaatcccgctcgaagcagccctgagaaacatcgcccattatctctccataccatctcccaaaatttttgccatcctcacactttaccactatttcattttatttttcttattaatataagaagacaggaatgtcaggcctctgagcccaagctaagctatcatatcccctgtgacctgcacgtacacatccagatggccagttcctgccttaactgatgacattccaccacaaaagaaatgaaaatggcctgttcctgccttaactgatgacattatcttgtgaaattccttctcctggctcatcctggctcaaaagctcccctactgagcaccttgtgacccctactcctgcccgccagagaacaacccccctttgactgtaattttcctttacctacccaaatcttataaaacggccccacccctgtctcccttcgctgactctcttttcggactcagcctgcctgcacccaggtgattaaaagctttattgctcacacaaagcctgtttggtggtctcttcacacggacgcgcatgaaactctgctcaccagaataaaagttccacaagttaaattttgaagtgtaacctatatgtgatattcacaggtgttttgaaatgggcatatgagttgctagtatcttagaattgctacagaaacaaatatttcctaaaaaggatatttgcagagatttcaaaatagcccatgtcatcaacatatcttaaacatatataacacagcacgagggaaatttgcatattttaatgcttggcaaaatagcaaagtttgcttttttaatgttatgtgttctttagttggtcataacagatttattataaatggacattctccaaaagtcattatgcttcctgatttattcatttgttttaatcttagagagatttgaattgaactagaaatgcatgtaattaaaacattaaagttgagctctgtttaaaatgggattgaaagaaaaacggctttggcaaacaccaattattgaacagattcacttagtatttttggtcttgattatttatagtccttttcaaaaagtatgtcaaggaaaagcaggcaaagaagctatgactggacatacacatgcaatttcaatgtccaaaatatatggttacaagtgtgagactggagttagatggacttggtctaaggtcccagatctgtctgtcttacgctgtagccataggcacaggcttctctgagcctcagtattattaccatgtttaacactgtagaaataatacctatttcacagggattttgtaagactttaataaagtagacataaataaataaagggagtgacacatcattgagatctcaatagatggaagccacttctaccattattgttttaaataataaatcgtgttaaattagccataaagatgggtatttcccatatcttttcaacatgtccctacatagatatgttctgataaatttgatccagggagagacactgaaaagattgaaaaagacataaagctgtctttgatgtccactttactccagagactttcagcatctttggtccccagtcctggtttcaccccctcatatgtgtgccctctttcatcttcctcttccgaggcagccagtgtctaaaagacaagacttctctcttctccagttttgggtctattcctaacctagtctcaactggctctttcttcactttttttttttttttaataattcaccaacataattaagtctatgttgtaaaaccagattcaaatattactttatcttttctttgtattgtagaaaatagaattaaatcttacagaaacagttgtataaaaactaacttgtgagctactatctcttgctaaagaaagctgtagctaattcgtgcagttcttattcatgatttttgcacaaatcataactattttcattgctatgcctattgaaaaatgccctactgaaaataatttgataaaaagaggaggttttttttgtttttttttttttgttttttttttttttttgctactacagtatttcaatgctaaggaaaaatagagctgtagctgagactcaaaaaaggctggaagaaggaactcaaattcagcaagagtgcttctctccctctcttggttagttgattacattattctaattgtgcactgacacaattagacgccctggcgtttgttagaggccactgatgtctcctataaaaaagtgtttctctgatctactttgaaaacaaacaaacaacaacaaaaccacctcagagaaggtccttgagaggaaagcttggatcaggtaattcccccaccgatcagctacagccagtaaggctggattatatcatacaaaaatagtctttgggagactatttccaaagtttttccaagaatgtcatttataagcaggtttattcaaactttaaaaaaaaatacttgacttcttatagaaaacttgtgaaatttttcaacaatgcaaggaaaggcagatttgggagtgtgactttaaatacaaactctaataaaactcagcctttccattaatgtctttatttttattttagtctcaactacacatgtaactgttttagatgtattattaaaaaaatagaaatctggccttacacgatggctttagtaaaacaggctgaaattatcttagtaaacaacatgatcatgacattgggcagcaactatttagatgccgcttttcaaaaacagcatctggagaccgaattcctgtttctctttggcttgcaaaaatcattattttgctgttaaatataggcctatggataatacacatttagagtttgggtctttaccttataaggtaaaagtaggtgtggaagtgtcataaaatagatagtgctacaaattccactggcaccattaacgagacccagctgtgcgtgttaaactcctcaaagaccaaacttcaggcactgcatgcatttagccaaaactcattatttctgagaacatttcagagttgccagaagttctattttggcatattgcagatatatcaataaatgctgagctttacaaatagcttgttgtatgtacttttcaaaagttaataagttacaaactcaacatttctgacatgatttcagtttcagctctgcactaatgtgcatggtttatgtctactgttgtggaagttcctacctgaaaccatctctccatcacaacactattgtcttcttgagaacaaacatccaaataattaagaaatcagacatgctaatttttggttccatatcataaatgtttattaatattaaatataaattaagaagaggtgttctgaagtaataattaaaactgatactatcacagaccacttatccatataaccctctctgaaagtagcttcttgggaacatacttcatgcatgtaagtacattttaagaacttcttgaaataaacaagtcatctgaatctatgtagctctgtatgtgatgcagaatcttctgtctactaaactattttttactgctttcagttttcttggtttattttcaagtgcttattgttgaattgtcataaagacctgaaccatgtttttgcagaccagtaaaccaacaactgaggcagtcagtcctgcccatttcctgctcctcgtatagttgatcatcaaaaaaaaaggcaatccaacataaccaccaatgccaataattgcataaacttagctttcaatcaatccataactacgagaattccattccaagcctgcacctttgctaagaaagtttatcacgaggtctgatggtgttctcttcttattatcttccagaaaccagaacatatattagtaaaaatgatctctgacatttcctagacaatcactgtattccacgcactatactgaatgatttgcaaacataatagaatttaaatctcacaatggagacactattcttactctttcttttacccagaggatatatcgaggtaaaatgatttgcataaggcttctcaggtaggtaaatggccaggagtcagcgttcctgaagtccatgctctcctctttcccagactcctttccttgcaaaagggcatgattctttcctgtttcttgaccagaggtttaagtggaaggctgttagcatgaaagtgttggaatagtcacccgccttgtacaaatgggttttcagggcatgaaccagcatctaaacttcagaagaactaagatagctgatatttcattgctctaacatagacagatcttagtccccaaatcttaatggcaactattagttacagaaggggaaatctatgataatgttctcttaggaaaataaaggccacctaaagaggacatacgttacattatgagatcaagctgatgccaacaaaatattggaaatatcaaagaatattctcacatatgtatagatggataggtgcatctaccatgaccagaccttatacatttatctttccttcttctccctatgtcctatagatgactgtttgggaagataaggccctgtatattttggtcctcttatttgtatgctatgaggatttctaataatcaaaacaattcatggtttggagcctaaaatatatttgctcatgtcacacaattgagacctttgagtgattatttctgttgtcagtcacttccagaaatgtgtcataacaagcagcagagtgacaagtacaggaaatgaatcactaaccttttgaccttcatcaacgtctgaacctaaaatttatagctgatgaacgtttaaataggactgagtttctcaactgaaaatgcctactttggatgccacttcatcttttgttaatggcctagaacttaagtaaatttaatcactataaaaaatgatttaaaagtgagaggttggaagatgttttttgttatttttaaattaagcatttgacatattttgggaaatactttggaagttcttcttaaatgatttggtgaaaacgtcactaagacaatggcattttgtctttgcttcttatccctagagcaaattcagcttttccctagagtaaaggtaagaatagcattgttctcagacttgatcttctcttgacttcagagaagctgtgttatgtctggaattctgaaggaaaaaggccagttgtatttttctggcaaattcattggcatttatatattttagattaaaaaacttaaatgtgttgttagggctaattttaagccaaacacattgttgatccctccagtggtaaacattttcaggaaagacattcctcttgaaaacgaaactccttaaaatatcatattctttagctaattttacaccaaaaaaatagtatcatgaaaaaatatgtacaaaatatttggtaacaatactgaaaccaccctgtgataaataaagggaatgaaatatttcctaagtgtacctcttagtggaaaatcaaaatcaccaaatatcaggttacttgcttcttgatataagacagtggttaacagtacagctttaaaatatgatgatagtataataaaatatgaagtaagcccccactcatatatataataaaagtgatgtcttattcctccaaatttttataaaacattaattacttgtctaatttgcttgcatacaaatgattaaatgtacctgtattagtctgttctcacactgctaataaagacatatgtgagactgggtaatttataaagtaaagaggtttaattgattcacagatccacatggctggggaagcctcacaatcatggcagaaggcaaaggaggagcaaagtcacttcttacttggcagcaggcaagagagcttgtgtaggtgaactctcatttataaaaccatcagatctcatgagacttattcattatcatgagaacagcatgggaaaaactcacccccatgattcaattacctcacaccaggtccctctcatgcacatgggaattattataattcatggtgagatttggctggggacacagccagaccttatcaatacctgagtaataagaacacttttcttacaaatatttgactctatcataagctatggattattccttgtgaatatctagattaatgaatggataaagatactggaagaacagaaattgtgacagtctaaatatgttacagctcttgctgtggacgaatttcatgcaaagcatcccagtaatgataatcattcactgacttttccaactaatttggaattggaaaaatatgaatacacctatatcaggttcctgattgtcaaattcacctaaatatcaggtctactttcttgccaaattgtcaaaaagcggaaatttgtcttaaatttatcatgagtacccaactttgttctagttcctagacacagacttcctcaacctcacacccccagatgggtcaacttgtactcttcttatataatttcaggcaagcccagtcactgtgttaatctagaacaagacaggataaagttcaatagtccagccctcaacctacctcagctttggattctctgaacttactcaagcatctagatctaggacctgagggctcaatgatcccacagtgatgcttgaatctcaggcgtctactatgagaagtagataactaggtaatcaacaacaacctctccagagaagataaatagatagggatgtacttatcttatatactgatatggtttgcctctgtgtccccacccaaatctcatcttgaattgtactcccacaattctcacatgttgttggagatacctggcgggaaataatttgaatcatgggggcagtttcccccatactgttctcatggtactgagtaagtctcacaagatctgatggttttatcacaggtttctgcttttgcatattcctcattttctcttgctgccaccatgtaagaagtgtctttcgcctcctgccctgattctgaggcttccccagccatgtagaactttaagtccaattaaacctcttttccttcccagtctcagtatatctttatcagcagcatgaaaacggactaatacagtaaattggtaacagcagagtggggcattgctgaaaaaatacccaaaaatgtgaagtaactttggaactggataacacgcagaggtggaagagtttagagggctcagaagaagacaggaaaatgtgggaaagtttggaacttcctagagacttgtcgaatggctttgacaaaaatgctgatagtgatatgaataataaggtccaggctgaggtggtctcagatggagatgaggaacttgttgggaactggagcaaaggtgactctcattatattttagcaaagagactggcagcattttgccctgccctagagatatgtggaacttgaacttgagagaggtgatttagggtatctggtggaagaaatttctaagcagcaaagcattcaaaagtgacttaggtgctgttaaaagcattccattttaaaagtgaaacagagcataagagtttagaaaatttgcagcctgacgatgcaatagaaaagaaaaacccattttctttctcctccattttttgaggatacattcaagccggctacagaaattgacataagtagcaaggatcctaatgttaatcccaaagaccatggggaaaatgtcccagggtccccatgctgtgtgcagcaagctagttatttcccagatacaatgtgggtaaaggcattgggtaaatacagccattccaaatgggagaaattgaccaaaacaaaggggcttccggccccatgcaagtctgaaatccaaaagggcagtcaaatcttaaagctccaaaatgatctcttttgatgccatatctcgcatctgggtcatgctgaggcaagaggtgggttcccatggtcttgggcagctctgcccctgtggctttgcagggtacagcctcgcctctggctgctttcgtgggccggcattgattgtctgcgtcttttccaggcgcacggtgcaagatgtcggtaaatctaccactctggggtctggaggacggtggccctcttctgacagctccagtaggcggtgccccagtagggactctgtgtgggggctccgaccctacatttcccttctacactgccttagccgaggttctccatgagggcatttcccctgcagcaaacttttgcctgggcatccaggcgtttccacacgtcttctgaaatctaggcagagatttcccaagcctcaattcttgacttctgtgcacctgcaggctcaataccacatggaaggtgccaaggcttagggcttccaccctctgaaggcacagcctgagctgcatgttggccccttttagccatttatttgtgcattcatccatgcataaagtttgggctgtttccacctattggttgttgtgaatggtgctgccatgatcatgagtctgcaaatacctctattaaaaaatagaactgccatatgattcagcaatcccacttctggatctacggagaaaagaattaaaagaggtatttgcagacttatgataaatgtggcatatacaaacagtgggatattatttagccttaaaaataatataatttagcctgtcatatgctacaccattgatgaaccttgaggacattaagctaaataaaacaagccagtcccagaaagtcaagtacagtatgacttcatttgtatgagatttctaaagtagtcaaattcatagaagcagaaattaaaatggtggttgctagggattgggtggaggaagaaatggggagttgttctttgtgttagtccgttttcaggctgctgataaacatatatctgggatagggtaatttacaaaagaaagaagtttattggacttacagctccacatagctggggagacctcacaatcatggtggaaggcaagaaggagcaagtcacatcttaggtggatggcagcaggcaaaaaggagcttgtacaggacaactcccgtttttaaaaccatcagatctcgtgagacccattcactatcacgagaacagcacaggaaagacctgcccccataattcaatcatctctcactgggtccctcccacaatacatgggaattatgggagatgagatttgagtggggacacagaaccaaaccatatcattctttaatagcaaatttcaaatttgcaagatgaaaaagttacagagatctgttacataacaatatagatgtatttaacacaattgaagtgtacacttaaaaaatggttaagatgttaaattttatattatgtgtttttttaccacattaaaagatactcaaggaattaaccgcttcttggatttcccatttctatattctgcctacctctctgcagggtacttggcacctgttaccttggccatgtccccctcaaatgccagctttgcattatctgctgccctcataagaagtaagtcgcctgtgcatttcccatgagattctgtgagtaattttctttggataattcacagctggtaaagccatttcagaatcactttcttcacggatagcaataattgttctctctagcagggcccaaaagagaagaagcaatttgctatacatgcatcactaaaagagataagcaaaaatcgccttatgaaattggcatggctttgcaagccccagatgatccctcgctttgacaaaagcatgccatgactcttggcctgaaagttaaattgttcatctaatgtatagtaaataaacactcagtaaaatcattgtttccctttaaattttcatacaaatagttctattcccctacaattaaatctcaaagcataatcggaaactttttacagattttggcagattttgattaaaaggtatttccattaccagagcttaataattagcagaaatgaaatttaaagtatctcattgattaagtacagttgttaaaaacaaaagaagaagaaaaaaagcctgctgtgggaattctcctttttggactctcctagcacattctattctgtactacaaataacttttactttctttaaaaaaaaaaaaaaagtacctctcttttatttaccagtaaatagctaaagatccaagtttctctttctttttgctttctaacctattttgactatttcacatctctttggacacttcattcaggtatcaaaagaatggaaacaaggaaaggtaaaaattaaagaaaacaattagagtcacagaaaatacataaactcattataaattatattccatatgaaataacaactccccaaagagtgcattacacatgataagactgtgctgacatacagtaatgatagtgttttctccattactgagtggcctaagaataatttaataaatacagtgtgcattgacaaaccaagacggcacaggtccgactgccttcttagactggaatttctaatatcttttcaaagttgttacaaaagttctgtgaacagttttaagaagtttgtagaccaggttacactcattttttgttttactgagattggtgaaaaaaaatatgtcaaagaaaggaatataaaaattacttaagttataagtaggaaagcaaattattgtctaattttaattaaagtagaccatagcctaaaatagctgaactatgttgcttttctcagaaaaaaagaatgtatcctgtctgtttctcatattttctataggcagaaaagaattaatgaagtcttatttctagttacattaaacctatcaaattttaattacatcagggaatgaagtgtaatttggtaccatcaagcaatcattgataacgtttcaaatgtcagattctctcatttaatcacacctctaatttatgagtgacattttagttatagaagctgataagatgtatcagataagttgataaagcagaaatagtgtcttaatgagcgttttaacaggaatagcgtccaaatctaaaatattcaaattttaccacttttaaagaataaatgaattttcaaagagccccttaggtatgggtcacaggattgcaaacatttggcaaaactcttcaagctgcagttaagccctgtccatttcactgtacatacattatacttaattaaaaaagattctttatcatggatccagatagctacagtcacttaatagaaaagaaaactcaagaaatagaaattctcatgctgtttgctattgacttttgcagtcactttaaaacttttttattctcttacttcaaccactatttgatcattgaatctggtcccagaggaatatgtggagaaccagttgaaccaactctttctgtgtttttcgcacaccttgtctctcagcattcatgatttagagagttcaacataggttttgagggcacattcatttcaagaggattacatgaaagtactaacttttttgtgtggctaaaagggcttttctttgttctgtcaccaggcgaaaaggtttattttgggaatgctccccatggcaaacctctttgagaaatgaattccgaattgcattaaaccctgtcttcaggaacttctagataaagcatttaaaggaaatactgggacattgtctatcttcaactttctaactttgagaagtgatcttagccaatctggaattttgatagatttcctagacacttcataaacgtttaaaataagcaactttgtaaaagactccacatttacctagccaaaaaaaaaaaatcctctcataaatgcaaaattagttcacaagtttgcaggtaggaattcttaaaatttgatacaactttttgctcatatatagaagtgaaatttacatagtagttagttgctagtgaattcataaataaaatttatcgataacagattttaagtaataagatgaaaaaaaaactatatccatagcagtactgctcaaggcatgagtaatgaaagtaacattaaaaaaaaatattggcctagaatctgtttccacttttctgcactttaagacactcctacagaggcagtttgtcagtcggactgatttattggagcaagaagtaactttaatccttttcttccattttacaaaaggggaaactgacacccagtcattcatgaagatcaatgaacaattctttacatttcacatggttgtctttacatgttaaggtgaaatatttaaggttaaacttcaattgcatattactgatgtctagaacactgtttccccaaaataagaaaaaaatttgcttaggctttctgcaattacaataataaaaagcatagtctgtgtaaccatttagacatgcattcaaatcctagctccaaatcctggtcccacaactaactagccacatgaccttaagtgaattactgagactcagtttcactgcctataacatcatagaaaataatacagagctggaagacaaacatcagagaatcaatgaggtactgtgaaaaggtgtctaatgcaggtggtagaccctgtaaggagtagctgatactgtgttttaaattccaaatgaggaatgtgtatatttaccttaaaattgtttggccttattcttgagcccaatgaccagttaataaagtataactgaatactttaaaatatcattatcaatttataaaaaatatttcttaagctcattttgtggcaggtagtgggatggtgcagaaagaacatataactcattcaagtccctgtcctgtaaaagaaattaagtcacacgaaatcaatagtgacccatagatgtctcttatgtgatcaagtgcttgctaagttgtggttaacagtccaaaagtgctccaagaaaagtaaagagatagacctcagtgaggattagagcagacttccaggactcagtggaggaaatttgaatggagatggagatgatgagaaggccagtggggagagagaaaagtcaccccacaggagccataggcatgaacccaacaaagcttgtataggaagggcagatccaacactgggtggagtcaactaagcaaaatattcatattccaaagcttccatataattccttattcagacaacattgtatattgttacttggctcagcaattgaatgttgacctcgttcttacgagacagggaggataaggactgcaattcaaaatagccagatttggaattagcactcacaaccctagaccatatttctcattcctttagccttactccgtaaccatgttcctaaccacatttcacacttaaagttcacctttttaaatagaaattgattttctacttccactgtcccagaaagcattgcctaagagccaaaaatccaaggttcttgtcccatctattccattaactaacatgaagcaaaaaacgagcctcctgtctctgggtgaaactgctacatggaatgggtgcttctgggtttgaagttccacagatccagtagggattttgctgattggaggacggcacagtactctccagtgcatctccaagcctgacttcctgacctcttttatacaatctctgggcaaaactaccagtcgctgttattttcctctctgcggtaaacatggagctcaagaatggatagaaagaccttattgtattgctctacctggtaaataaatatcatgttgaatttgcatggcagctttctgattattttcatgtctccgataagcatcaagtctgtcataggtacagtataaaaatgcctgagattgcctaacaccgatactgtggcaggaagagaggagaagagctgtactggggaaaatgaggagtacttgtaatcctctctcggggcagtgagagggcctgggaagaaaagatcgagctgttccgtgttggggttaatgttggcttgaaatgaaacttcagggcaaaatgaagcagagcaaagagcagcgcccacaaaccaaccttaaatatcacagcggcggaacatttacctgaaagaaaagtgacacttggcattaaaagttcaattatcacgttcagtgcagagccttgttctagtctggagctgccgggtgtcacatggtgcgtgataacttgcccttgatttgggttcatttgaagagcgtagaactctaacaaataaacagccttttgggacctgtccccggacgaggactgcccccctccctcgggcaactactactgatgctgtccaggcatcgcccaaggggaaaggttgcagcggggtcggaaggcgcgggaggagtctggcggtgattgatgggaagggatgaatgaataaaagtacttgtctgatggcagcagagaccccgagcaaacggtggaggctacactgtctggcattctcgcagcgtttcgtcagagccggacccgcctgcagctcaagggaggcgtgctcctctcccagagcaggctggaacccagctgggttccgcctcccgggaaggtggtctccattcgtcgctctgcatctggtttgtcagatccgagaggtaaacattcgggcttggtgttgaattaaaatcattgattgaaccttattctggggcttcggtttggcttactagtttgggattttaaaaaaataaaaattaagcctatagagagggcaaattaaaattaggttgggtaaaggaaggagcgcgagtgtttgaagccgtttggagggaacagcggtttccaagttcctgctgacttgagaagtctctgcgggtttccgaatctccggcgcactcctgggcgcgctgcgggagctgtagctcagccagccagggagtagcggctttcatccgccgggaggagtctttcgagttcaatcgcggggtatagaggttcccctgcggggcaaaatgcagagcttgacacaagcccttggcctctaggtgccttaattccgcggttcccacgcacgcttaactaagacgtgtctgtattcctcccgttacgtgaaagagttcggagctttgcctgggacccccatcattccctccctggcacaccccttccagaacgccccgccccactgcatattatttacccctcctggccacgcgggggaagaaaaacagctgagagggcatcaggaaggagtttcgacccgcgctggcgagtcatgagcgccaagtttcccactggcgcgcaaacttgagttacttttgagcgtggatactggcgaagaggctgcgggcggtattagcgtttgcagcgacttggctcgggcagctgacccaagtgtcctgtcttccttcctctgcttgtctctaggctctgaaactgcggagcggccaccggacgccttctggagcaggtagcagcatgcagccgcctccaagtctgtgcggacgcgccctggttgcgctggttcttgcctgcggcctgtcgcggatctggggagaggagagaggcttcccgcctgacagggccactccgcttttgcaaaccgcagagataatgacgccacccactaagaccttatggcccaagggttccaacgccagtctggcgcggtcgttggcacctgcggaggtgcctaaaggagacaggacggcaggatctccgccacgcaccatctcccctcccccgtgccaaggacccatcgagatcaaggagactttcaaatacatcaacacggttgtgtcctgccttgtgttcgtgctggggatcatcgggaactccacacttctgagaattatctacaagaacaagtgcatgcgaaacggtcccaatatcttgatcgccagcttggctctgggagacctgctgcacatcgtcattgacatccctatcaatgtctacaaggtaaagggcgcctgctgaaatcatggtgggcttgaggaagggggcctggttggagacggggagatgagaaagcttgtagagggagcttccctttagctccctcttaaggttctgcccctcctaaaagtcagtaatctttggaaccaaattccatttggttctgtccactcataaaagtcagtaaccattggaataaaattccattcaggtcttcagtagacctctgctaagcttaggacaagcgtagtccccagtctagcaatgttagtatcactttgggaacttggtgcacatgaagatttttctggcctcaccccagacctactgaatcagaaactctggagtggagcacagtaatttgtattttaacaagccctttatgtgattatgatgaactgtaaagtttgagaaccactagtcctgaaggatctagtccctaagtgcacctaatggggtacatcctctagtcaaaagtgtgtggtccatggacagtcagcatcaatattacctgagagtttgttaggaatgcaaggctacctcagacttactaagttagaatctgcatcttaagatcttcatgtgattgatatgcccactaactttgggaaggactgttttggaagactttgaaagtagcaggtacaaagtaggtatttaggaaataaatggcctggaaaaaagagatccagactggtgagtaggaaaaacacagttcacctgctgtgacggactgtagctactttgtattaaatatctacagtgggccaaggactgggtgagatgtgttacttccattattccttccagcagcccacaagtagatattacaattagtttacagatgactggtaggatgatcaaagtaaatgaattagaggtggagctggggatcagacccaatctgtcaggttccaaagtgcaagctatatgatggcaccccatcaattatttcatggacaagaccaaggagcactcaaaatctgtaagggtttcggtagttaacattattgtgtgattaccatgggcgtcagtagaaacacacaaagagccaggttgctccaggttgctttggaactccagacacatcccagcacctctgggcctcagtttcctcaattccacaataaggctgccagtgcccacttactgaggctttatggtgttaaaaaaaaaaaagcagtctaaataaaacagttggaaaatttcaaagacatatgaaaatatttaaaactttcccagcagcagcagcagcagcagcaatagaaagttgcacataaaaacacaatcacagtgtaaggaaatggaattgtgctttgcagatttgcctatagctagccctgacttcagtacttcagtacaaggggaaaaaaatggaatgtaaagttgggaaatgttgtagggaatgctttgacctattggcaggagtagttaccataaggcatgcctgtaaatttcccttcataaatctctaaaaatcctaacccaatagctatattttaaggggaattccgaacatttctgaggtttagcggtgagagtggattaggatatagttttctctaaagggaatcacccccggaaatgggggaatcgattgaagaaatcctaaaatcctgtatggcaattgattctgatgaactgtgaggatttacttggtaagagctgaaattgaatctctaaatgcagccacaactccatgagggccagaagtgacccttttacttcttaaggcgtcccacaaactaaatcttcccattctaatttggcaaaggaatttcaattcaattcatcaaaaccgaattgagaacttttcagtacaaggtgttgtgataaatttaaaataaatctaacaagatctcttcccaaagggagattaaaatctagttttgctaggttggcacaggattttatgaaagttctgtttagggggtcaggaaaccccacatgtccagcccagttagaaacctttctaaatcagacagtagctgaagtgctgtgtagaaggtgggattgagaacatttttttagttctggtgtgctgcctccaggacagatataaatcagctcttccagaaccatcttatttcctctgtctggttaaatgagtatttgtaataaactagagaatttctgactccccaagaggtcatacagtttccctttcatttcaaactcccatatgatttccctaggaagttacatccttttccctgaagccatccagtcttaacatgactgtgtttttacttctgaaataagccaatgagtcattataaatctgtccatccattaatctacatgggtcacaaacacattcatcacattacgtcccatcactaaggtcatcattattgaatcctaccttgtggccttaggtttagcttgagacacaatatcataataatggctaccagttaatgatgcactaggcacttggtttatttcattaagtcactataacaaccctgtagaggaggtatcgttatcattcctgctttagatctaggcaaactacttgtcagagaggtgaagaagtaacttgcctaatgtcataccactacaaagtaatgaaactggggcttgaaagcagatcatccagcccaagaccctgtggtccaccccatcccactgcacaaagcatgctcaggcactgcatggtcatctccaaccttgagtattgttttaggatctcatttgggagcatttggtggaattatggcaaataatatgctatcccacagtagaatacttggtaaacattttcagaaattaatttgagtcaggatttcggtctcttgaaacccccttcagctggtctgtagtgtgtaatatcagtggaagttattctaatggcttaatttaccaaaatatcaaatccaggaccagttaaaagccatttattctcctaaataattgtggcaacgtagtttttttaatgcatttagaatttcagagtagtcaggtatgatcattcagaaaaaagtaatttaaatgagttatgaaggctatatttaatatatcctaatatgagaggcttaaatctaaaccagtgatttctaatttttttggtggggttttataattctctttgagaattcaatatacacaatttctgggggtttgtgaaattctcctactctcttgttggcacactaagggcccagaggcccagaaatgtcaatgtgaatctattccattaatctagagtttaatgaatatagagttcagtaaagttgacaaatcacaaaatgtcatagctcttattggaagctacagtcttcaggctgtggaattggtgggactttatctggagttgctgcagtgggaagctgaaaagcattgggaaacatgtctgatctgcctggacttcctcaaggagctgggtccctggaaacttttaggaagaatcataccactctcacaggtctcctgtgttgtgggtgaaatcctgtgttgaaggctagggaagtgtctgaggacacttagcaagttgaggctgctgaagaactttaaactcatgtaaacatgcagaaaataataagcgttgcttacgcttctcataggcacacactagggctatgcctacattacacaacaccaaccagaagaacaatgaaaacttcaggcatccaaaggagatatttatttaaatatatatgcacgtgtacatgtacatacattaaaatgttaagttttataagaatatataagtaaaaagatgactatcatttggcacagggcatggcatatagcaagaaatgataaatgttattaaaatgtgtgtatgtgtgtgtatgtgcgttttgagtattctttgttttccagcttttgtcgtgacaaacatgactacaaacgacatgtttgtacatatggctttgcacacatgtgtgactacatctgaagggtaaatttttataactggaattattaaatcaaaatgtgtgtgcattgtaattttgaaagatattgccatattgtgctagaaagttattcttgtactcttggtattaatcactattttatataatatctcaatatggatgtaaatgcatattaatgtttatctgtaatatgtatatgggccaccatgcttaatatttacatagtctacatatacatcagaaccaaaagccagtgcttgactacctgacgttaggatgaatttctccttattcacaagctacttattttgcccttcctatatatcctaaaataaatggggtaatctagatatttgttcacatgagagcctggtgttccactactaagttgtagaagcatagatatcaaagctggataaaaagcaagacagccgggtatacttggggatgctatcaatgtgtttatgttgttgtttggttggttagttgatttggcttggtttgctttggcaatgatatttaacaaaacttggttgtaggttgggagaagttaaaaattcttgagcaaatagtgagttcttaaattacttctgaattttattaactctctttatgttatatttacatggataactgagttaaagaagttagctctcaaatatagcttcctttatgtgtaaagaaattgcatttaaaaacaaatctacttgcaaactgataagacaaataccaatatccacattaactagtttggtaaggatccaaaggtaatcaggtgtccagtggtgatggagagctagaaattaggctggtgacccactggagtgcttctagatggttttacagttaagaactgtaggctactattagaggcaaagaggctgcattcatagttctgaaaggcaaaactgctgatctttaacgtttaactagttaagggtgggaacatataacattaaaatgctggtatgtcaaaatgcggaattgcttcactgaacccacaaatgagtttcgagtgaagtgaccttggcaggtaatcagacattttctgcttgtgacacaatcaggattatctttctgaacaaatttaccttttgcactatcctcttagactacttctggtacttaacaagtttatgtataattaactagttttgtagttaaaagtaaaagttgatggaacaccaccaacttttgaagttataattttccagtcagtaaactgaagtatattcacatattccaatcagtaaactgaagcatatgcatatatagcaacacaagaagtaagggtatcattgggagaggagtctaatttatcccagtttaataacaatgttctcatttccagtcaagtaactgaaatattttagtaatatttaaagatattttaccagcataagcattctgaaccaaaagtggaacctgtatgatttatgtaaagcaaaataatttttaaggagcaccaattaagtgcatttaaagtattaacttttaaaacgtgttaattaaaagccaggcttttagcttgaatgacctggaatcagttaacaatacagcaaataccctgacacccatctatcatagtggctgcaactgtcaatactacacaaatgcttcagacaaatgatgttatacagaagacataagagtagtgggctttttccactcatatttttactgatgtccaaatgaaaaagaaaaagaaagcttgattccttctgtattaaagtattgtcatagtcagataacaggttgatagcagaattcaaatcaaccagaaactcagacttcatattcccaattcactgtttcacatgttggtcatagatttctgtgacaaaatggtcagtaagcacttggccttgggcaatgcaaggttccctaggttcaatttgatggtatttcttgtgtgtgcctttgatctgccacttggtcactccgtaaatccaagcctctacaaatgtcaaggtaaggttttctttcaatatggtaaggcttatctatcaaaaggtttacatttctcagtttgctcatttaaaatgagtctttcaagattgaagatatttccatagttgtacaaaaggataacgtagccaagaccctgttgtctccaggccagggagccatgttcttcaattcacaaagaaaaccatataagggtatctctgtgtagctaatatgctatagttgattatttttagagaaacatgccaaatgctaataaatgattaagttctttaaagggtgttgacagataaagcctgagctgaaataagattcaagatgtaatttatgatgtgaaacattctctttcaggactttgcacagttaaaaagaagttggttatgtttgggagatagctgaatgtggtgtgtgggtataccttagccaacaacttctctaattttagactttttattatttccaaggcttttattttagagagttatttatccttccctgtagggcctctggtgaaaatgtaaaggaacaagaaaatggccaaaatgtggtggtggatgggagagagggagagagagaggagaaggcgtgaagggagaagatagaagaggatcattcttgaatcagaaatttattagcaaaattgattgaagcatttctcaagcaagtctccccttttgaggctcaaaactgcactcatgcctgctgacctgtgtcttttccccacttctgtcttcttcagtttcattgtagtttccagaaaggaggaaaactatcctcagaatgtttacactgtacgctgtcttcttcccactcactcagtgtgttcagcctattttaatgagctttcagattccatagtaatcagacattttctgatcacagcttattagtctcccataagatattccacagatagaattaggcttaggtatggcatgaagttacttaataaggtttgttgaattcatgtagtttgcaagtctcgttctgagccaggaggccctcaggttctcattcttctgtgtcttcagatatcaccagtgatcttagaagatccagctcagataagtgaactaataataggccaggtttgtgaatggggtttgttatttcccttagttggatcttttcaaaatatgtaatatgtcggtgatagttttaaagctcaaactatggatatatttttaaatttagataataaaagagtacaatcaatttctttcctggcctgttacagactcagaaataaatttctggtaggaaaatatatttgaggtaaacttcaatttctcttaagaaatatttttaaaaaattgttttctatctctatgtttctcttagagattttgtttcaagaactttaattcattttcataagccattgttctatttcagcaagttagaggaatctttccagagctgtgaaaaggcctctgttttgtggatgtgtgtgaaatagattcccatggacagaaccgctgccttgcacaactctagggggcactgtacttattgtaatctattgagatggcacccctgggggataagctaacattatttctgacccacatatttctaactcacataggctaatctttaagtgattaagggcattctgatggatgcagggtagaacttgtaatttatatttgtccttcagggcacggtgcactgtatgtcaagaagaaaatatttccatgcacttgatcagcatattgactccaaattcaaagcttactttgaactatttctttgtgtattaatacagaaagagttctggcatggaagtcctttagtgaaggtgccctatctcattaaaactctagttcaaacacagaaaaactcttaactactacaggaaacagagacaaaaacagaatacaccctttcctaaagttgtgaaatgcagccattccattattttccttttttgactcttactgtgaaaacatttatataatgccagtcgtttaaagaaacgttcacaacttatcacaggatggaatagactgcagtctggcaaagtaatcttggttgtcctcttaattacaccactcactcatcctctaaaacaatcatctcttacaatgctcctatgtttactgcatctacttccacgaaacttaacaatcctctccacagctgaagctcttcatagactcccattacatagtgagaaacagtaggttctgttttgtatcagtcattgccttgacaagtttgagtaggagagagagggtgggagaggaatttttgtcgttaccttttccgccctgcatggaagagcagaactccaacaagagtccagcccactctcaagcctcaattctagagtttctgactctatgtgccaagaagacctgatcatcagtactagaaaatataaatagtaaatatacagtcatgtcaattatctaaagaatatatgtagagtatgagaactgaaaagctcatgacaaatgttttgtcatagatgatttctgccgtgtgatcaaattcattcatccactcatccgttcatcgttacttaacaaacattgaatgagtgaccactgtgtgccaatcactgtactaggcattataaatgttgtagaatattctgaaacaaataaacagttaaagctcaatgtacatttgtaatttaataaagtagaaaaagaaaatgctatctatgtttaatgaggtgagtgaacatttgcttgtacaagatggttaactttgacatttcctgactttatggggcttgactccttttggcattaacaggggtgtgtgttaacaggattttttttcttcatttattatctcaagtatgtgatttttaattaaaaagagaaatgaaacatgtaaatcccctggttagagagattttgtaggattcacttcacaaaaccctcaaataagtaaagaatatttgtttcttattcatgctatttatccttttagaaaaattttaaactataatatcaaaatgactttataatgtaatagaataatttatttggattctcttgccttgtttctttctcaagcagctgttccaaggtaaagttataaaatcacggtctttcttgagtagaaatcttttagccagtatggccacaccttttttcaatctagtgtttatttatttgtgtttatcatccaaaagaaatgttctagagaagcagtataagccttagggtaaaatgggtcagcacaaacataggctatcattttgtcaaatggataccatattgccagcaggacttaacactaacaacagctattcagttagatgagacatcatgatatgaaaaccagtgccagttatgtgagtattgccaactggctcatatttgatcaatgttaggtaacatatattcaactgaattttaaacaggatttaaaattttaatttatgtggaagcgacatagtgtcaatattaaactctaaacaccctttttgcgatcagagagacagccttttgattacatgtttgaattgtcttcactgttcagaccttgcccttaagttatctaatttaatggggtaaagtccaaagaaaaaactaaaaatagggaataaggaatgtgttattgctgggtttaaagttagagttgcttcctcttgcaataaagtgaatccatttcctcttcagtggggaaagctgtatccttagacttcaaattattgatgttagatgttgttatttttcccaaagaatgatgaagaaatgaatgtctaagaatcatacccatctataagaacaatctctcaccaaattttaaagatggcatcttggttgagagtgaatttttttttttttttttttggcaaaacttcatagtttttccccaccagggatacctttatattttaggtaagcttcaagcactagcttgcctaaagactttcttgctagaggccattaagatgacagagatgagcatcaatagtgggcatggtttctgtcacagagtatcaggctttgctgggtctccacaaagccttctgatcagtgaggcagaggttaagatttttaaaggaagagcgtttagagtctcgccaaagccatccttctcactacaaaataatggaagcaacagtgcatgctcttcccacatcttctatggccttccagagccaatagcatccagttctaaattgaaagcatgaaatgctgaaagctgataaaggttaatgctctctctctctttttttttttttttttttttttgcagtctctttcccttcaaaagtgtagactagaaaactgtaatctctccgtggtgattacgtgtctgactatctctctgttgagcttgaagagcattgttataattttcagtttgtgtttccctgttttctgtgatagcttgggtcagaggttgggctgcaggcctccagtggtatgaagagcaataatccaatttctaggctgagccaaaaacaatggaaacctcaaaacatggcctggattcagtgcagagctcattttcatcagccagacttctttcccttcaatggtctggacgctcattcatcttgattcttctgatagccatacctacaggataacaatattaacatatttggaaataatttaagacagaataaaatattttaaaatatccaaatgtttgtacattatttgaataaaataactagggggattagtcagggttctccagagaaacagaaccagtgggatagatagatggatggataggtagataggtagttagtagacagacagataaatagataatgaggaattggtttatgagattatagaggctaagaagtcccataattggccatttgcaagctgcaaatataggaaagccagtggtgtaattcagtccaagtccaaaggcctgagaaaccagtctgagggccaggggagatgaaatgagacattccagataggaagaaaaaggggcaaattccttctgcctctgccttttgttctattcaggccctcaagagattggataatggccacccacctagggtaaggcaatctgctgttctgagtccacaaattcatatactaatttcttccagacacatcctcacagacacactcagaaatagagaatgtttaattgagcaaccagtggctggtcaagttaacacataaagttaaccatcgcactaggtgagcagaagattttgctctgcatctagatattttactattatttgacacatagctataggtttaaaaaaaatttgatttaattctaaacattttgttttgtacaatcacctccttcaaaccactgtcgggcaggtattatagtggttgtaagcataggctctagaccatctgggttcaaatgtggatctattactcacttaagtgagcaaacaaatgcaagcaggcatgtgggtttcctaatgaataacaaattaccctacaatttagtggcttaaaacagtaaatattttttaaatcacattgtgtctttggtttggcaattaaggagtggcttagttgggtggccctggcttagggtctctcaagaaggtacatttaaaatactggctggggatgcagttgtccaaacgtttgtctaaagctggaggatcctcttattcacagacgtggcaaattagtgcttgatgttttcaagaggcctcagttctttgccatctggtttctccacagaggtgcttgagtgtcctcatgacatggcagctggcctcccccagaataagtgttccaagagagaggaagccagttctttaggaactagtgtcagacatcacacatcatcacttttgtcacattgtattcattgaaaacaaatcactaagtccaatccacattcaaaggcagggaaattaggcttcatgttttgaagggaggagtaatcaatagcagaatattgtctgaataagttgtaccaggctgggtctagcataatccttgaaaccagttggataatttttattcttatttctaagggtaattggcagttcttttaaagctacatgggttcaaagctggttcagacctgtggtgcactgagtctcccccatttcagtaaatggcttcaccatgcacatggtaaacctctgtgagtgtcctgacttccaacatcatgtgtccaacccatcagcaagtcctgctagctacctctacccttaaaatatatacagcctataacccgctcttcacagcctcagggcgcacaggatccagctcaccactagttctcatcagtgcttcctttcttggccctacattctattctacactgggcagcaacagtgatctcttgaaaaatatgttagatcatgccatttcccttcttcaaaccttgcaatgaactccctcaaaaaaagcattcaaattcttccctctacaacttcattttccatgcatttgggctgggtcagtcttctccagctttagtagctagtagcctcattgctgtacctccagttcaccaggcttgttttgacctcagggcgtttgcacatgctcttgcctctgcctagaatgctcttcgcatggcttactgtcttatttcagtcaagtctctcctcaaatgctgtctcttcagggtgaccttactgagaagcttatcaagaaaacacctcaaatcccaccctcactcaatatgatcacagcctctgtttaacaccattttaagtatgtatgtgttttttgtctgcctccctcactatagtgtaaactccatgagagcaggagtgctcagaatggtgtctggcacatagtgaatgctcaataaatattcattgaatgaatgaatgaacaagcagaattaatgagtcagttgattaacccagaagtcacaagatagaggctatgatggctcacagatgtattttgataatacaatgttatatgagagttttttaaaaatatatatgaattggactttaataaattgtgagattcatataaaaattccaatctgggttctttagaaaaatcaagagatttttgtatttggagccccttagcaaaaagtatgtgatgtctactagcagctgctcctttcagacaaagtttaccccagaccccaccccactccctgtcatcttcctgacaccaatgactttctgagacctggcaccctccacttctctgtgttacctgcctggccctgtaggtcttcaggatcctacattaagcatatatatgataagtctgccaacttttgtcctacatgtctgtgtaagttttgatatctaacttagaaatgaagttggtcctatgttgaatctccaagtcaaattcattatgagacaaacattttagcctttgacgtcattctagttatagaacaatcaactcagcttgacaaactcggtagagtcttcactactagtgaaaggatggaaagactccattgtgtctcaaaataattttcacttttgcaaggttgtttttcaaactatttttaagacccatggatttgaaatacttttattttcaaaacctcatgaacatttgatccagatgttcacctaaaatgattcatttaccagtgtgggacacaccatattgtcctaagaaagaaaataaccacatttaataatagatggtttcatagtctgcagtcagataaagagaaatatatacgtgtacatatatacacactatatatatataacatactatgtgtgtgtataaatatatatctataatagcaataactatgtcttcttgctccttatacagccagtcactgttatattttagagtctatgaatcaagcactgttaatattaaacatctgctatgtgtcaggcactgttctaggcagttgtggagctcatagtctgtcttacactccagggatccagacagaaaaaaatctaagcaaacaaataagttaatgtgttatgccacaggaattgatagactatggataaaaaggaaaagagagtagggagatagggatgtctgaccggttacggtatctaatagtgtgatcaaggtaagtcatgttgaaaagatgaaatttgagtaagacctgaaggagataagcgagttaaccaggtgaatctgtggggaaagagccttctaggataaggaaggacctacagcgaaagccctaagtaggaatgtgcctggtgtgtttgagcaactgtgtagctactcctactgaatgattgttcagttaggtaaactgactgcaatgaagaacaagtgcctgaatgcacatgctgttctgcatggagtactacttcagtagggaagtctggtctcctcagctaaggactgtttatcattcaattttaattaacccatattttgctttggccatgatctgggcatttcagactccatgacagtatacaggttcaattttcaggaggaacttaagcgactggctcaagtttgctctgatgaggtgagctgaactctaagctactgtatacgcatgatgacttcttataagctggctgcattttcatcaatcccaacacactttcctgtcccatacatatatcaaacaatggtgcttttcaaagaagtagtccatgagaaaaagaatgacaaccagagtttatcctactctgcatgttaattactcttcactaagtgatacaattcagagggcatcttatgaaaccccctaacagagcttcgtgtcttctcaatgcagctgctggcagaggactggccatttggagctgagatgtgtaagctggtgcctttcatacagaaagcctctgtgggaatcactgtgctgagtctatgtgctctgagtattgacaggtagaagcttctatttaatccaagtatattctgaatatatactattgttttccatgttacttagaaaataaactgtgcaattcaataaaactaaggtatgccagcttaaaatacaattctatttttatcttcagatatcgagctgttgcttcttggagtagaattaaaggaattggggttccaaaatggacagcagtagaaattgttttgatttgggtggtctctgtggttctggctgtccctgaagccataggttttgatataattacgatggactacaaaggaagttatctgcgaatctgcttgcttcatcccgttcagaagacagctttcatgcaggtaaatttcactttttttattttcctttctgctcttgccttataaatatttagctatttttcccctgttccccactccttgggaaactgttgatttatgactgtccttggcataaattaagagtatagatccaaggactgtggagttaatggtgatcaatgactcaagctgcaagaagctagatcactacttctctaagaatccccttgatctcagtggcatagataaaccaggtccacatgaaagaattgatgtgaatttatagctttctacctaaagccatgttagaagtaaaatgtttggtgccacaaagtgaaaatagcactcaggcaaaagttttctcagcaaggcaatttacttctatagaaggttgtgtctcacaatggagcaatggcgagagcacaccagacaagggaggggaagggggtgttatccctgatgtagctagttcccactgctgcatctttcccctattgggtagggttggaccgcacagtctaagttaattccaattggctattttaaaaagagcaggggtacgagctggagtggtggggtgagtagtttcagcgggaaggacagttacagagcaggtggctaaggatgactaaggtcagagcaggtggctaaggatgactaaggacagagcaggtgactaaggatgactaaggacagagcaggtgatgaaggataactaaggaaagagcaggtgatagaggctaggagggggttgtttactgaaactaggggcaaggagatgtaaagaatgagggagttaaactttaaaatggagaacaaagaacagggaagctgaacacactgacatattggttctttgaagaggaatttactgtatcctacagccccataaggactgacaactactacgtaatctgcacaagatagcccagtagttgtcagaggaatggatggtccagcaaatattcagatagaagtcaccctgatatggatggagtctgaatggcaagactcccctctctctgtctttgatgccaaaaagaaagctgccattgcaagaaacttttcatcctggtcatttattaaagaacatttgattagggaatagaaaaagaatgatgatactcgtttccagaagatagatcctgagtgtaaaaggctcttcccaacagaatgagttaagagacattaatgcaaagggggctggcttaactattcccaatgattattttctattgaatatataaggagactaaataaaactttatgaactgtatatatcatgataagtaaaagaatcaaggacataatgtgaaattgaaaatgaaattgctatttccttgtttcctattagtaaaaagaaaaaaaaagtgctgcctaggttacataatttcctctccaacacagatatatctaaagcaatatgaaaaagataacagagaagaaaaagaataagagatacgacataagtcaaaagcagattttgtctttttgcgaggttagatttatatgttactgagctaaatggttaacctagaccttttcgtatctgttgttcccattaaacaaacttgctaaaaaatgagaacttcatctaaacactaagttatctttacatatttaggtgttatatttcacacaaaaaatactctaaggataagtttcttatgtgaagacaaagcattgaattaccaaatatttcaaattttgcctaactacttaagtttttgtgcatgcttataacacattgtcttagagaactgaaatatttttgggaaaatttgttttatttaacatgactatttatttgttcagtaagtgtggcctgaaagattctgtatgatatatacaaactggatctaatttagaagataatcattccctgatgaatttttttaagtttaacatttgttatataagattttcttacagaggagtattaatcgtaaaaattctctcatccctatagttttacaagacagcaaaagattggtggctattcagtttctatttctgcttgccattggccatcactgcatttttttatacactaatgacctgtgaaatgttgagaaagaaaagtggcatgcagattgctttaaatgatcacctaaagcaggtaagaaaatacaaatatttgataactcgtggttgaatttataattatgaatatgaaaattatgatgatgatgatgataaactaacattattatataccagagcatatttcctttttcttgtttctggtagttttaaatagataaagaatatttttatattatttatttggagatattctatataatctaaaaggatctagggagaatcagaactttttaaagatgaatctctagtcacttcggttccacttcacattaactattccatataaagctcagtgtcctgagtttttacatatgccactgactttttgtagacaatattaaatgtcgttttagaagatagaatgctatgagtaaaatgagccatcttttaagggtcaaactatggatttatttcagagacgggaagtggccaaaaccgtcttttgcctggtccttgtctttgccctctgctggcttccccttcacctcagcaggattctgaagctcactctttataatcagaatgatcccaatagatgtgaacttttgaggtaagaaaggcaaactagaaatggttttgtaaataaatgccactcagaagtgtttccatcgatcttttttataggcagaaagacagactaccatttttctaacccttaggaagtcatggagactcccaatttttatctgaggtcctgttgagagggacagggaagggggggtatgaagaacactgggtacagagagtcagagttgtcaagatgatgagtgagtgccaaggcggaaaatgtcaggtccgattctccaacgcgttttctaaatttcttcttttcagccagcttcagtacttccaaatgagattttattttaaaagagaagaattgggcctgggaaggggaaatggaggaaagtcagtagaaatgctagagttagagggggacacagacagagacaggcagagaatcattgttagcaaagacgagtgataaatttagaaccattgtatattggcattttttttccttacaaaagcacagaagctacaatgactacatgttcagaatagcatatttttcagacacattttgggttattttgttgcagctttctgttggtattggactatattggtatcaacatggcttcactgaattcctgcattaacccaattgctctgtatttggtgagcaaaagattcaaaaactgctttaaggtaagagactatcccaaaataaaaagctctttgtaatatggctcaaatataagctttcaaaactgctaatatatctatccagacagatttagtaaattatcttatagtttcccttttattacatcatggatgatttttttaaatacaacttttgcttgtaaatcactataattgttttttcctataaatcctagtcagccactccctactgcctcagccaatcagttacactcatggaattgttgaccaaaaagtaataaaaattacatgcattgatgtctgataggcatcacataataaaataagggctaaacatgaattaaaggccctgttccctgtttttggtagattctgaacttcgcagctgcaattattattataactaaattagttcctttttcacatggactgtgagaatagcaaggtaaacaaaaaaaaaatagtttaggttttacctctttcttccttttttgtataacagtgatgtgctgttcaatgtgaaatacatataattccttcttcagctgcttgcattttatcatccttctattcattcactccttcaacaatctaacatgaaataaaatatcccctcccctaatgtgaaaatcatccatttgtccatggtatttcactactggaaagctaagaacgtagctcccgcgtaaacactaaggcagcctataacattcttcgcccactcataactcaaattttagagttggaagagaacttccatcaggatcaacaccctcattttataagacataaaacagtggacttctcattttcttttacaaatagaatgaacagaagacaagcagaatgaaaaaatttttatatttaaaaaaacttcaagaaaaaaattgaagaaaactgagatgcttttgtactatataaccttattgtttaccaatattgaaaagagatatgagaatacatggctgaaaaaataggaaagcagtattaaattcattgacatgagaagatatttatgtcactgtcaagtgagaaaaagcaggttaaatcttctcagcaaagtggcttagaataacttgggatgaggtgtttgtgaaagtatctacaaggttatggagtatacatacagtacagtctcagtaaaataattatactcacattctccagcacatgcacatatacatgtgtataatttatttatttcatgtatgtgcaaatatttctgttttcatggggaaaagtcttgaattatatgtttatcaaatattatcaaataaccaagagtaaatatcaattaaaagtggctttctcttgttgagaaattttaactatgtaggtttttttcttctctgcatttttttagttaaaaaattatcatatgctactactgtgattatattcttttaagagggaaaataaaagagcactgaaagaaagggcccaagaactcctaatcatacaaagaaagtcagaaccctggagaggaggaagagttgggaaaggtgactgatgttaacatataatgagttactttgttttgtacagtcatgcttatgctgctggtgccagtcatttgaagaaaaacagtccttggaggaaaagcagtcgtgcttaaagttcaaagctaatgatcacggatatgacaacttccgttccagtaataaatacagctcatcttgaaagaagaactattcactgtatttcattttctttatattggaccgaagtcattaaaacaaaatgaaacatttgccaaaacaaaacaaaaaactatgtatttgcacagcacactattaaaatattaagtgtaattattttaacactcacagctacatatgacattttatgagctgtttacggcatggaaagaaaatcagtgggaattaagaaagcctcgtcgtgaaagcacttaattttttacagttagcacttcaacatagctcttaacaacttccaggatattcacacaacacttaggcttaaaaatgagctcactcagaatttctattctttctaaaaagagatttatttttaaatcaatgggactctgatataaaggaagaataagtcactgtaaaacagaacttttaaatgaagcttaaattactcaatttaaaattttaaaatcctttaaaacaacttttcaattaatattatcacactattatcagattgtaattagatgcaaatgagagagcagtttagttgttgcatttttcggacactggaaacatttaaatgatcaggagggagtaacagaaagagcaaggctgtttttgaaaatcattacactttcactagaagcccaaacctcagcattctgcaatatgtaaccaacatgtcacaaacaagcagcatgtaacagactggcacatgtgccagctgaatttaaaatataatacttttaaaaagaaaattattacatcctttacattcagttaagatcaaacctcacaaagagaaatagaatgtttgaaaggctatcccaaaagacttttttgaatctgtcattcacataccctgtgaagacaatactatctacaattttttcaggattattaaaatcttcttctttcactatcgtagcttaaactctgtttggttttgtcatctgtaaatacttacctacatacactgcatgtagatgattaaatgagggcaggccctgtgctcatagctttacgatggagagatgccagtgacctcataataaagactgtgaactgcctggtgcagtgtccacatgacaaaggggcaggtagcaccctctctcacccatgctgtggttaaaatggtttctagcatatgtataatgctatagttaaaatactatttttcaaaatcatacagattagtacatttaacagctacctgtaaagcttattactaatttttgtattatttttgtaaatagccaatagaaaagtttgcttgacatggtgcttttctttcatctagaggcaaaactgctttttgagaccgtaagaacctcttagctttgtgcgttcctgcctaatttttatatcttctaagcaaagtgccttaggatagcttgggatgagatgtgtgtgaaagtatgtacaagagaaaacggaagagagaggaaatgaggtggggttggaggaaacccatggggacagattcccattcttagcctaacgttcgtcattgcctcgtcacatcaatgcaaaaggtcctgattttgttccagcaaaacacagtgcaatgttctcagagtgactttcgaaataaattgggcccaagagctttaactcggtcttaaaatatgcccaaatttttactttgtttttcttttaataggctgggccacatgttggaaataagctagtaatgttgttttctgtcaatattgaatgtgatggtacagtaaaccaaaacccaacaatgtggccagaaagaaagagcaataataattaattcacacaccatatggattctatttataaatcacccacaaacttgttctttaatttcatcccaatcactttttcagaggcctgttatcatagaagtcattttagactctcaattttaaattaattttgaatcactaatattttcacagtttattaatatatttaatttctatttaaattttagattatttttattaccatgtactgaatttttacatcctgataccttttccttctccatgtcagtatcatgttctctaattatcttgccaaattttgaaactacacacaaaaagcatacttgcattatttataataaaattgcattcagtggctttttaaaaaaatgtttgattcaaaactttaacatactgataagtaagaaacaattataatttctttacatactcaaaaccaagatagaaaaaggtgctatcgttcaacttcaaaacatgtttcctagtattaaggactttaatatagcaacagacaaaattattgttaacatggatgttacagctcaaaagatttataaaagattttaacctattttctcccttattatccactgctaatgtggatgtatgttcaaacaccttttagtattgatagcttacatatggccaaaggaatacagtttatagcaaaacatgggtatgctgtagctaactttataaaagtgtaatataacaatgtaaaaaattatatatctgggaggattttttggttgcctaaagtggctatagttactgattttttattatgtaagcaaaaccaataaaaatttaagtttttttaacaactaccttatttttcactgtacagacactaattcattaaatactaattgattgtttaaaagaaatataaatgtgacaagtggacattatttatgttaaatatacaattatcaagcaagtatgaagttattcaattaaaatgccacatttctggtctctggg

SEQ ID NO: 95 - DNA, 134551 bp, Homo sapiens
actctggcccggcagcctcgccgcccgcagcctcgctccgctcctcgcgcttcccctccctccggggctgggcctgccccggccgtcgcggagcctcccctcccaccgtccgtgagtgtacgcgcccggccgccgcctccaggcagcccggagcaacccggcgcccggccccgctgggcgcagcactccgtcggcggcggcggcggcgcgatgctgtgcttcctgaggggaatggctttcgtccccttcctcttggtgacctggtcgtcagccgccttcattatctcctacgtggtcgccgtgctctccgggcacgtcaaccccttcctcccgtatatcaggtgagtggcagggtgggcgtcagggccccaggagcaggcacagggaccacagggagcgctgccgacggggagggaaggcgtccggacccagcttggggcgtcgtgtggtcaggcagaggtgggagcaggaggagaggtgctcccgatagcctgggatgtttagggaggcagcgggtgcggcgctgagcacttctgcctgtacccggagcatggaacagggtggcagcaaggagaggttcaggatagatggtagagctttcattctgggtatgggacagaatctcagcaggacgttcttaggcgatattgaaacaagatgggttctgatagatgacatatattatacaagaggtagatccaggtatatgctaaacagccactattttcacttctgcatcccaacatcccttgaagtggatgtttgggcttattattcccgcaagcgagcggtggtgtaaagttgatgaaatatcatcaacgtgacactgatgtcacactagttaatggtaggagcagaattcacacccggccatgcagaaagcaacactgtgctgcccccaggtctctgggagtctggcttaaattctctggagctgcaccagacacctctgggcactgtgaccccaaagtcctcaacttgtcaacaacttgtgacatcttttgtgttattttacccattcacttttcctgtgctttggcctctaccttcctgaggggcacttcagtgccagggacagtggtctgatcctcctatgtgggttccagctcagtgcctttctcatagtggcaggattctttaaacgttagaaccatccatccttatctaagtagtgtgacccctctggacaggcattggttggtgaacggatgataaggttggtgacacccaaggtttgttactgctatgatagaaaatgtagggcgtcttcttccctgcagccattctgtctggtgagcaatgttctgtgtttttttgtttgtttgtttgtttttttcctttttttgggggtgggggtgaggagtgtggagaaaggggaaacaaagatcgagcaagaggggactagcattttttaaaattttttttatttttttgagacagagtcttgttctgtcgcccaggctggagtgcagtgacacaatctcggctcaccgcaacctctgcctcccgggttcaagcgattctcctgcctcagcctcccaagtagctgagattacaggcgtgcaccaccacacctggcttaatttttttgtatttttagtagagacagggtttcactatgttggtcaggctggtctcaaattcctgacctcaagtgatcctcttgccttggcctcccaaaatgctaggattacaggtgtgagccagtgttcccagggaaccagcatttacaagatgcagggaatacagcaataggtagaatagtgcaaatttgcagtaatgatggtggtttttgcctatgaaaggagatgttatgtatatcaagatgttctcatctggcctttcggttttttccatttattgttattattttttattttcagtagagacaaagtctcactatattgcccaggctggtcttaaactcctgggctcaagcattccccttgctttggcctcccagagtgttgggattacaggcgtgagccaccacgcctggccctcccatctggtattatgcttggaagaaacctaggcttggtttctcatggcacatctcaggcccaagtgccatcatcttgcttctgaagcaggatagatccttctagacttgtgtaaaagtaaagacctgctcagctgggcacagtggctcacgcctgtaatcccagcactttgggaggccgaggctggcggatcatgaggtcaagagatcgagaccatcctggccaacatggtaaaacctcatctctactaaaaatacagaaattagctgggcgtggtggtgcacgcctgtagtcccagctactcgggaggctgaggcagaattgcttgaacccgggaggcagaggttgcagtgagccgagacagagctactgcactccagcctggtgacagagcgagactccatctcagaaaaaaaaaaaaaaggtaaagagctgctctacctgcagtgctgcttcttttgtttgtttgtttgtttgttttttcagacaaagtctcgctctgttgcccagtctgtggtgtggtggtgggatcacagctcactgcagcctcgacctcctgggctccattgatcctcccacctcagcctcctgaatagctggggactgtagataggcatgcacaaccatgcccagctaatttttaatttttttttgtatttgtagagatggcatcttgctgtgtcctgcaatgcttcctttttttttttttttttttttttttttaagacagagtcttgctctgtcgcccaggctggagtgcaatggtgcaatctcggctcagtgcaacctccacctcctggttcaagcaattctcctgactcagcctcccaagtagctgggattacaggcacctgccaccacgcccagctaatatttttgtatttttagtagagacggggtttcaccatgttggccaggctggtctcaagctcctgacctcagatgatccacctgcctcagcctcctaaagtgttgggattacaggcgtgagccaccacacccagcctgcagtgcttcttattgagaaaacagtagtcatgtttgtcccagatctgaaggttgaggacagataatacgtgatattcattggccaggctgtcaaaggcaggttttgaatgttcatagaggtgtctgatgtagttgtgattaatatcactctaaggtgaacttgaaatgggagacattcagaaatgggaaaataagctgacaaggtgaaccacttatgagatgctcaaatcacagaccctacaaggaaggggtttaaaatttaacaaggaagccttcaggaaaagcagaattacaggagaaaaaggcatgcccccttgttgccaggagttctcagccaacacacaacaaacatttgtactgattgcccatgtgtgcctgggtcttttaggttgtttgctctctgcttacctgagcagccggagcactggattgcccctgcccgctcctagaaaacaagtccttggtgcagcaacaagatgtggataagaaccacacatagagaagaaggctgggtgcagtctctactaaaaatatataaaattagctgagcgtggtggcacattcctgtgatcccagctactcaggaggctgaggcatgagaatcgcttgaaccagggaggcagaggttgccgtgaaccgagactgtgccactgcactccagtctgggtgactgagtgagactctttctcaaaaaaatgaaagaaccagacatagagaagtgataactctacatttatctactggccttgaaatattcaaccttatccctttttgttgtgttttttttggaggtggggtcttgctatgttgcccaggctggtctcgaactccatggctcaagcaatcccctgacctcagcctactgagtacttgagattaaaagtgtgcacccccatgccaggctgaaggtatctcttagctcatcacctcctcctctcctctacccctactctttgtacttcccttcaaccacgctggccttgtgtcttaaacacatcaagcacccgtccttctcaagacctttgcagtggctgttccctctgccaggtgttctccctgcagctatttttcacttacctcttttgttcaaacgttaccttcctgcagagtttttcacttacctcctttgttcaaatgttatcatcttgatgagacctgccctgatcaccctttttaaaaattgcacctgaccactactggtctccatatccagtcttattattcaccacagcacgtatcaccttctaacaaatcatgtgatttaacttatttattatgtttattttctgtctcccttcactggattgtaaggtccatgaaagctctcaatatttgctgaatgaatatttctgaatgactatttcttgggtactcactctttaccccaggacagggcagatcccttaaggaaaagcttgacatggccattctgtttggtggctagtcagtgatttgaaagtccttaggatgagtttccttttacattctaacattgttcagtcattctgatggtctaatttttttttttttttttttttttttttttgagacggagtttcccaggctggagtgcagtggcgcgatctcggctcactgcaagctccgcctcccgggttcacgccattttcctgcctcagcctcccgagtagctgggactacaggcgcccgccacccctcccggctaattttttgtatttttttagtagagacggggtttcaccatgttagtcaggatggtctcgatctcctgaccttgtgatccgcccgcctcagcctcccaaagtgctgggattacaggcgtgagccaccgcgcccggcccctgatggtctaatgtttttagcacagttgaacactttaaataagagccacaaccataaggaggacctctccccagtatggcatttagaatcagcttccttatcagatactttctccttgtaacattgttattcttcagcatattggataaattggcaaatggctcttatacacatgaaaagatactcaactttatgaataggaataaatattcaaattaaaactcactgatgccagttgtgatctagtgggttagcagaaacccaaatgtttgatactagtactggtgagaatatggggaaacagtctctctcatacattgcttacaggaacgtgaattgatttcagtctccatggtgggacttgggcaatatctatggaaatgacagatacacacacacccccccatcatttgatgcaacagcctttttttttttttttttttttgaaatttatcctataggtgtacatgcccatgtgaagaatggcatttctgcagagttactcagggcattgctttgaataacaaaagattggaaactacaaatgactatcagtagagaattgcctaaataaatatggtttatttattaaaggatacttcaagtgaaagctctctgtacctagcagatttttacgtcaatacacttatatggaaaaatctccaagatacattgttacatgggaaaaagcaagatgcagaacaacctatgctctcgttagttaagaaaaaagaggagaaaaataatatatatttgcattagcttgcataaagaaactaatgaaagtggtttatctgtgtgtgatggagggaggagtaggtcaaggtcagtgagacattggcagatggggaaaaaggataattataaggcatacttttttgttttattttttacccaaataggtttttttttttttttttgagatggagtttcactcttgttgcccaggctggagtacaatggcacgatctcggctcaccacaacctccgcctcccgggttcaagcgattctcctgcctcagcctcctgatagctgggattacaggcacgtgccaccacacctggctaatttttttgtatttttagtagagacggggtttcaccatgttagccagggtggtctcgatctcctgacttcatgatccgcccacctcggcctcccaaagtgctgggattacaggcgtgagccactgcgccccgcatgaatgtttcctatcagaaaattaaattaaaaacatgaggccgggcgcagtggctcactcacgcctgtaatcccagcactttgggaggccaaagcaggcggatcacgaggtcaagagatcgcaaccattctggccaacattgtgaaaccctatctctactaaaaatacaaaaattagctgggcatggtggcatgtgcctgtagtcccagctactcaggaggctgaggcagaagaatcgcttgaacccggaggtggaggttgcagtggaccgagattgtgccactgcactccagcctggtgatagagcgagactctttctcaaaaaaaaaaaaaataaataaatacaaaataaaaacatgggaccaaccaccgtgagatataacaagttagaatagcataaagtgatatttcttattctgaaaccattaacaaaagcatatcaaaaggaaggacaaataaaagctaatctcaaaaaattagtttagatttgcactcgggtgtggtgccttatgcctgtaatcccagcactttgggaggctgaagtgggctgatcacttgagtccgggtgtttgagaccagccatgggcaatatggtgcaaccctgtctctacaatacatacaaaaaattagctgagcgtggtaggatgcacctacagtcccacttactcaggagcctgagtgggaggatcacttgagcctgcagtctgaggctgcagtgatcactccagcttgggtgacagagtgataccctgtctcaaaaaaaaaaaaaaaaaaaaaagatttgcacacggccacacccacattctcaagccaaatcatgcttaacttgttatagtttcttatcaaattattaactttttccagctgatagatcactgtcttccatcttctttttggcatgtgtctcctgccatgatatcttgctcatgatattctgtgatcctttactcttcagtgttgccgattctagatcctggcttttctctttattagcacgtctcactttccatgtgaatacagttttgtgggatagattgtggcctttggccacccatattgtcctacctcatgaccccataatctctgctcagtagttgatgacagaaaactgggtcacctagaatcaagccactttaaaaggaggaacaaaattgcagagtaaatgaagtaaaagaagtttggtcaggtctttaacttcaaaaatgatactaaaaattaggaaaataacgattttaacttgcatttatgtaacaatcacaaattttgggttatgacaagtgtgtgttaaatcttcagatgctgatctttatagagaaaatgtttttttttttttttttgagatggagtttcacttttgttgcccaggctggagtgcaatggcgcaatcttggcccactgcaacctcctgccacctggttcaagcgattctcccacctcatcctcccgagtagctgtgattagaggcatgtgccaccacgcccggctaattttgtatttttagtagacacggggtttctctatgttggtcaggctggtcttgaactcccgccttggcctcccaaagtgctgggataacaggcgtgagccaccacacccagccttgcattctttttccaatacaattttatgattatattatagtaagtctttcatttcacatttaactttaaagaaagtttccttcttctctttttgtttgtttttgataaacccttgtgtcaagcgctgactttcagtagctcaaatcgagggagggagctgctctgctactacgaaaccctgccccagaagcaggttgtctgtgaatggtttaacaccaggtttcccatgaaccacattaagcttttgaagggggataggaagaggttcatttttgcaaaaatgtctgaagactccaattttcccactggacttttttttttttttttttttttgacagagttttgctctgtcacccaggctggagagcagtggcatgatctcagctcactgcagcctctgcctcccagttcaagtgattctcctgtctcagcctcctgagtagccaggactacaggtgcccgccaccatgcccacctaattttttttatttttagtagagacagggtttcactatgttggccaggctggtctcgaactcctggcctcaagtgatctgcccacctcggcctcaaaaagtgctgggattacaggtgtgagccaccgcgtccggcctcccagtggccattcttaatctatatgtaaggatattgatcttgtttattacctgtctcacacaaaatatatgctccatgaggatagagatttggggtttgtccacagcatttgtgatagagcctgacacattgcaggcacttggtaaatattggttgaatgttgaacaagataatttgtgtcatatggtcctgtttcattaaccttgttagtttcctcctctttaattgttaactgattctgccagcacctcattgttcattgactttggttgcagttctgttttccagcacagttagagatgaaatccttgtgtttcagaagatttgcggtcccagtttgtggtcgatttgacttgcattgttgactatttacaatatttaataataatactgagagggaacatagcatgattaagagcaacagctttggaacagacagcctggattagggtatggctccattatgtgttccagctgtagaactttggacaggttacttgacttctctctgcttctctattggttaataattgcacgtacttcattattaacatgaactcacagaaaactcattaacaccctggtggaggaacatagtatgtagaagcacttgctattagtattatcaaggggccagtccacattgggctggataggaaaggatgtttggttgggagctaattttagaagtgatcgctttatatgtgaatgtaatatcagaagctcttttattcagtagcctcaacttaatcaacttgctgggttaactgatgaatttgttctttgaaaaatgcactgactgaagccaatggcctctgaaaactccctcctgtgagggccactctgtaggtacttgcttctcttacccatgtctttgtattctcatcaaatgccaattgtgtttattcccaaattgtatttatgttcatgccagttgtattttgtattgtaactgtgtgacttaatgcaatacatattaactgttgatctgtgtaggcaaaaagagaattgtaatttctaaaaaaatttggttgggccggatgcagtggctcatgcctggaatcccagtgctttgggaggctgaggtgggcggatcacttgaggtcaggagttcaataccagcctggccaacatggtgaaaccccttctctattaaaaatacaaaattagccgggcatggtggcacacacttgtaatcccagctactcgggaggctgaggcaggagagtcactcgaacctgggaggcagatgttgctgtgagctgagattgtgccattgcactccagcctgggcgacaagagtgaaactccgtttcaaaaaaaaaaaaaaaattggttaaatgctttggaaagattaaaaagagacaaattgtccgaaaaaaatttgtagcctttttggtaattatctgacagctgtaaagatttaggaaactggtataaggaaaactggaaggagtctgaattcaaattgcttcaaaagtgtttttaagacttccctccactttaaagaaaccaaaattggaaatgagatgattcagagtagatgcgatttatatgccaagaagacatagtggacccatactcttgtaacggctttggtctacatccacaggtgggcaaatgaatacacattgatacactttaagttaaaataaaatgtttgtggtatgtattcattcatacaagttctgaagacttttttctttttcttttttttttgagacgaagtctcactctgtcacccaggctggagtgcagtgttgcaatctcggttcgctgcaacctctgcctcctgggctcaagtgattctctggcctcaaccccctgagtagctgggactacaggcacgtgccaccatgcacagctaattttttgtttttgtttttttagtagagacgggggtttcaccatgttggccaggctggtctcgaactcctgacctcaagtgatctgcctgccttggcctcccaaagtcctgagattacaggcatgagccactgtgcctggccctaatttttgatgacttttgcttaaaccaacttttttgattactgagactacacagaatttcaggcagtggtgatgttggctttcctgttcagccgtaacaatgagtaccaggataaaaaatactcagttaatgagggctgtgtgcataaaatcacgtattctgacatgatgttaatgacatatcagtttttacagtgcagtgattataacctcgtagtatttctaatctacagtgtcacaaagatgaaaaggtaggcatgccatttaaaacctttagctagaaaagtattattattattattgttttgagacagagtttttgctctgttgcccaggctggtgtgcaatggtgtgatctcagctcactgcagcctcctcctcctgggttcaagtgattctcctgactcagcctcccgagtagctgggattacaggcgtccgccaccatgcctggctaatttttgtattttttagtagagacggggttttaccatgttggttaggctggtctcgaactcttgacctcaggcgatccacccacctcagcctcccgaagtgctaggattacaggcatgagccactgtgcctggccgaaaagtattatttttgagatgatcatttataattgaatattgatttcacaaacacatgaaattagttaattctaagaaaagcatagtaagaaaagtgaagatcccaaacttttgcagccccaaaattaactgagggtgatggatggagtgttgttcagcctgagtctactgtaaatatataatttctcctctgatttgaattttccctgtcatttgggtacaacaaattcttttgttctcagtgaattaagtaaaattatgaatatttttcttctatttttccttttaaaagggcattagagtattgctcaaaagtcttgactgatgcagggctgatgactttcaaacatctcaattttttttttttttttttttttttttttttggtcaggggacagggtctcactctgttgcccagactggattgcagtggcatgatctcagctcactgcagcgtctgccttccgggctcaagtgatcctcctacctcagcctcccaagtagctaggactacaggaacatgtcaccatgcttggctaattttgtgtttttgtagagacgggatctcactgtattgcctgggctggtcttgaactcctgggctcaagagatcctcccacctcagcctcacataatgctgggattacaagtgtgagccactgtgcctggcctcaatctcaattaaaaaaaagtttcatagtcctctttacgtcacagtaattgcctttcattccatcaagaacatgcattgaagagttgttgtgagccaaggacaccatagctggctccagaagaaatagctgatatacccctgattgaaatgtacaacatgtaaactcacatgaaaatgataacaactttaaagaaatgtaatatagcacagcagagaagagttcctaaattgtttccattgaaattagagagttctagggttctttcctcttggaagtcccctctcgtgagagagctgttttcctttctctttcttttccctattaaacctccactcagacaagaaaagagacgagatgagacgagatgagaagagaagaaggaaggaagtaaggaaggaaaggaaggaaggaaaggaaggaaggaaggaaggaaaagaaggcaggaaaaaaggaaattggagagttctagatgcacagcttggcttccttgtttactctgtgatcaagttagttttctaagaccgtttcctcatctttaagatggcaatagtgagcaggacgtggtggcttacgcctgtaatccccacattttgggaagccaaggcaggtggatcacttgaggtcaggagtttgagaccagcctggccaacatgatgaaaccccatctctactaaaaatacaaaaattagccatgcatggtggtgggtgcctgtaatcccagctacttgggaggctgaggcacgagaattgcttaaacctgtgaggcagaggttgcagtgagccgagatcgtgccactacactccagcctggatgacaagagttagactctgtctcaaaaaaaaaaaaaaaaaaaaaagatgccagtaatgagtactttctaatgttgtgaagatcaagtaagatgtgcctggcggaatgtagttgccaaggaagtgttcatttctaattttttctttttcttttttcttttttgatttttatttattttttgagatgaagcctcactctgtcggccaggctggagtgcagtggcacgatcttggctcactgtaacctctgcctcctgggttcaagcgattctcctgcctcagccacccgagtagctgggattacaggtatgtgccaccacgcctggctaatttttgtattttttagtagagacagggtttcaccatgttgcccaggctgctatcaaactcctgacctcaggtgatctgcctgccttggcctcccaaagtgctgggatgacaggtgagaaccaccgagcccggccctattttttttggtccttgtagccactggagtccatgtggggatggtttctagagattcccctcaaataactttccaaatcaaaccacgttcatctccctctttatcaccatactgggctaagcactctggacaaactgctaaaatagcttccttacggtctccctggtccacaattgcctctctacagtcttttcaaaacatcctttaaaaacatgttgtatgtgtgaacaagagggaactctgatggagagagggcaaaattgcttgtgggtagtgagaaaagagcaaggtatttgtatttgtcagtaggaaattctttttaagtttcagaatagttgatatagctgaagggtgcccccgccattctatttttttttttttttttttgagtcggcgtcttgctctgtcacccaggctggagtgcaatggcgtgatctcagctcactgcaacctccacttcccgggttcaagcgattctcctgcctcagccttccgagtagctgggactacaggcgcccgccaccacgcccagctaatttttatacttttaatagagacggggtttcaccatgttggccaggatggtctcgatctcttgaccttgtgatccgcccgcctcggcctcccaaagtgctgggattacaggcgtgagccaccgcgcccggcctgccccccacattctaaaacagtcatcaccaagtgaagctgccagaaagttagctctcgtaactaaaagtagctaataaaatgtagtatgactttttattccgtacttatcccttttaaataatatatttaaatattataaagataaaggaaatgatgttctctttatactggggaattatgttttttttagattctaagtccctatcaatcatccaagcaattagtgtatgagtttggaacaatctaataaatttcaggctggagacacacatgatgttgcattttgttagcatctaagttcctccaataaaccataattctaggctttggaatatttaaatcctgtgtatccagtaacttaaagaacaaagtttgaccaagcttcagaaagtcttctattatccagcatgttttctttgtatcgttttcattcctttcagtatcaagtgattattcactagcttaacatcataaattagtttgaagtaggatgttacacaaacgacttggaattttccacagtctgcttaacttgcagaaatgtaaatacaggaaatgtggacataaacggatttcctaggcacaacctacccctaaaataactgtgtatacataacagcctcaacagcttctgaaccacaggcaaatgaacaatttgctggccttgtcctctttacagtttccagaaagtgccttattagcaaggaggcaaatcaggtggtgggtggagctgggcagggcccactgcactgcagaaactgtgtggtgcagaatgatgtggtaggagctgggtagagagactactgctgccaggctgggaagcaactggttttgcctctcactcattctccagtgtactgaatcaggcacccaggcacagttaggccacccaaatactactacctctgcccttgcatgatggaatcatttagcttgagcttaaaaaaaataaataaataaaaagaggttacccacagggtctcttggttacctcttagtgtttacttatctggattccagtatcaccagaatatgtgacttaatatttacttatgtatgctgtccaaaaaagcaaaaaacaaaccaacaaaagtaaaaaatatttacttaatatataaaatcagacgtggaaagacataagaacatttttcattgagaggtaagagctatttcatttttattttattttttatttttttttttgagacagagtcttgctgtgtcgcccaggctggtatgcagtggtgcgatctcggctcactgcaacctccacctcctgggttcaagagattcttatgcctcagcctcctgagtagctgggattacaggcacccaccaccatgccaggctaatttttttttttttttttttttttgtatttttagtagagatagggtttcaccatgttggccaggctggtctcgagcccctaacctcaagtgatccacctgcctcggcctctcagagtgctgggattactacaggtgtgagctaatgtgcgcccagccttctttcatctttaaaatggtaatgggcaaacactattgttcttaaaagttttgaaacgttcacattttcatttgcctcttggaaagttttcatgaactattcttgagcaaaatttcagctaatgtaaattggtactgctttgtcacttagtggaatttttttaaaattatttttatgtattttttatttcctcacctctttgaattctacacttagtgtaaataaatcacaaattgataattgttatctgatagatttgggaatttgtgactcagattgtatctaacaaatattttgctgatgaatgagtaaattctatagctatctgtggagttaaaagaaaaaaactttgaaaagatgggtgtttaatcaaacaactggttatgaatttttgttgtgtcaacactgttgtattgtactgttgcagtgcaaaggtgtaggaatgtgggccattgatattcaggcattgatggtgggtgttatagcctcagtcatcctgaaaaataatcagatttaccatggcagtatttggcagaaaggttttacaattatagcatttgaggagtttctaagatcttgcctagtttacatctttctggtctacaacaaaggcataatgatgtcttctcatcaccatgctggttcattcccgtggtgtgctggagctagctggtgtctgctcctgagcagggactgtgtgcctctcttccaactccacgttcagtgacctgccgtttggtagcccaaattttgtttttatttatttatttcgtttttttgttttggttcttttggtagcctgaattttaacgtgttgagagtattttcaccatggaagttggcaaatgccacaaaccaggcaccctccagagctggctgttaaacactgaccagcatctatattagtgtttgctccccgcccccaatcattctcctaatggcttagttccttgtctgctgttaaagcagaggagaggctgggaagtcagggagttaaacatctgtattgggatagggaatcctctgtgtagctctgtgatcttgaacaagttatatagcctctctaatacccaatttcctactttgtaaaatggggttgatatagacccccctcagggttgtaaagatgaaatgaactgatatatggtaagcacctaatggtgcctggtgggtacatagtcaatgctcagtaagtggtgttgattaggtcaatttttttttttttttggccagtactgatattcattcaatggctatttgcaaagtgcttttggttccacctgtatagttttatttatttacttatttattttaatcttagtcccaaatattctgagcttcccttcacctgtatgtttttttttaaaattaattaattaatttatttttgagacaaggtctcactctgtcacccaggctggagggcagtggcatgatcttggctcactgcaacctctgcctactgggctcaagtgatctttccaccttagcctcccaagtagctgggactacaggtaggtgccgccatgcctggctttttgtatttattttattttttatttattttttaatttttgagacagagtctcatgctattgcctaggctggagtgcaatggcatgatctcggctcactgcaacctccacctcccaggttcaaatgattctcctgcctcagcctcctgagtagctgggattacaggcatgcaccactatgcctggctaatttttatattttagtagagatggggtttcaccatgttggccaggctggtcttgaactcctaacccgaagtgatccacccgtctcagcctcccaaagtgctgggattacaggcatgagctaccacacccggccaatttttgtattttttgtagagacagggtttcaccatgttgcccagactggtttcgaactcctgagctcaagtgatccatcctcctcggcctcccaaaatgctgggattacaggtgtgagctaccgtgcctggcctccacctgtatggttttaaatgtacagataagcaagaatagaacacgaccctggaattccaagttttcagatcacgtgtttgatgtcatgtggactccacacctgggcctttgacatagtctcaatttgccatcaatagacagagtccccaggtctggtcttctcttcagtcagagcacctagagcaccttcatatcgccacctccctatcttcctaaatatcctcctcattctttcattgccttccctttctccacagacaggcaaacaaccttcttcccagcgcttctcctctgtgtttgctccgatgcctggcatgtggctgtctgaggttcagaattattctcagacctgtgtaacaagaactctaggatgagtcacctggtgcctgcttttttataccctcaggccaaggcagggaggcctgatttccctggcagagttaattgtgtggcaaaagtgctgcccaaggttatgagctgtctctgcttttttccccattactggttcccattcctgtctctctgcccattcagcattgtgctcagaagggcatcctccacctcaacattcctgtagtgtgaaaaatggttattgtaggaaaagtggtaatgctaaattcgaaacccttcaggttttttttttttttttttttttttttttttacccaggctggagtgcagtggcgtgatctcagctcactgcaaactctacctcctgggttcaagtgattctcctgcctcagtctcccgagtagcttggattacaggcacgctgtaccatgcccagttaatttttgtatttttagtagaaacagggtttcaccatgttggccaggctggtctcgaactcctgagctcaagtgatcttcccgcctcggcccacagaagtcctggaattacaggcatgagccactatacccagcctaaatcctaaacccttcaggttcttgcaataccagtgacattgaaattgaattaatttggaataaaggcatttgctgtaagggaggctattttttttttttttttttttttgagaaggagtctcactctgtcacccagactggagtacagtggcacgatctcggctcactgcaacctccgccctctgagttcaagcgattctcctgcctcagcctccggattagctgggattaccggcgtctgccaccgcgcctggctaattttttatatgtttagtagagacagggtttcaccatgttggccaggctggtcttgaactcctgacctcgtgatccacctgcctcgggctcccgtagtgctgggattacaggtgtgaaccaccgcgcctggtcgtaagggaggctattaacttctttttcttttttttgagacggagtcttgctctgttgcccaggctggagtgcaatggcgcaatcttggctcactgcaacctctgcctcctgggttcaagcgattctcctgcctcagcctcctgagtagctgggattacaggcacccaccaccatgcttagctaatttttgtattttttagtagagatgggatttcatcatgttggtcaggctggtctcgaactcctgaccacaggtgatccacctgcctcgacctccgaaagtgctgggattacaggcgtgggccactgtgcccggccctattaacttctttatactccagtttaaatactaagtgttcgcaaaacttaaaaaattcctgttttctgcacacacaggctccttgtggaattcttcaaacacttacaagtgcatcattttcaacgtgatcggttttttaatacttaaatttcagagctgtttacaaatgtagaaacactcaaaatgagttcaagttgtttcatgttgggagctcttttgccatcagttttaaagtgagcagcctgaaaatgaaaaaaattaaagcttggcactaatagaaaatagaacatgttggccagacatggtggcttacacctgtaatcccagcactttcggaggttgaggcaagaggattgcttgagctcaggacttcaaaaccagcctgggtaacatagcaaaaccctgtctctaaaaaataaaaaaaaagaacatgtcaaacagtattttccaactcatttaattaattgaaagactgtacctgaaaaatgttttacagaaacccttttttgttaaaataatttaccacaattaatataccctagataccctattatttccataaagtattcctagagatcaataatattgttcagttttctttttcttttttttttttgagacagagtttcactgttgttgcttaggctggagtgcaatggtgtgatctcggctcaccgcaacctccgcctcctgggttcaagtgattctcctgcctcagcctcctgagtagctggggttacaggcatgtgccaccatggccggctaattttgtatttttagtagagatgaggcttctccatgttggtcaggctggtctcgaacttctgacctcaggtgatccgcccgcctcagcctcccaaagtgctgggattacaggcgtgagccaccgtgaccggcctcagatttttatcataatattttcagcagataataaaatctcaattattagaaaataaagtgatgtgtttatgtgtatttaacatgccaatattagaattttcaaacgcgatttatttttattttttttttgagaccgagtcttgctctgttgcccaggctcgaatgcagtggcatgatctcggctcaccataacctccgcctccctggttcaagagattttcctgcttcagcctcccaagtagttgggactacaggcacctgccaccatgctaggctaatttttgtatttttagtagagatgggggttttaccatgttggccaggctggtcttgaactcctgacctcaggtgatcctcccacctccacctcccaaagtgctgggattacaggtgtgagccgctgcacccggcctcaaacatgattttagatcttttttttttgtttttgtttttctttttcaaagtagtcattcttcactgagaaggaacacataccaaggttagtgggttcgatcatttgaaaaatggcagcaccattcattttaaacattttctggctttttactatggaatctctcatggtataaaaataaattttagatttttcagagccaaaatgaaaatactttagaacaaaatcaggccaaatctttggaattcaaagtggctgaacacctaaaagaaacagaatataaaactcgccaattacgtgtcttcccagaggtctggacagaatttctttctaataatttggacatttcttccctttgccagtgatacgggaacaacacctccagagagtggtatttttggatttatgataaacttctctgcatttcttggtaagtacacaataattattataaataattgaaaagctcacaattccaagtgaagttgatgtgtcatttgtagttttcatataatttttattttattttatttattttttctgagacagggtctctgtcatccaggctggagtgcagtggcgtgatcacggctcactgcagcctcaacctgccaggctcaagcagtcctcccacctcagcctccggagtagctggtactacaggtgcacaccaccacgcccagctaattttttgtagttttttgtagagatggggtttcaccatgttgccaggctggccttgagctcccgggcttcagtgatccacctgccttggcctctcaaagtgctgaacttataggtgtgagccactgcacacggccttgtgtataatttttttaaaagcacaatctttgcagctagatttttgtcctattttgagaaactgaagttaaaagatataaaaaattatggctttattagagaactatactttaattagtaatttgtaacaggatttgctgtaggtggttttaaataccaaacttctggaacggattttaagtgcaatttagtttttaaaagtgttgatttatggtcaagacacttatgtaagccaaagacacccaatgcgtaagctaagtttctcaaagtgtattctgaaggcaagctgatgaaaagtcacctggagttctcgtaaaatgcaggttcctgggccatgctactcaaccagaacctttgggagtgtgggttcctgaagatgtgttgtaaacaagcactctaggggacttggtttctcactaaagtttgaggaccattgacaaaggcattatcttacctgttagagaaaggggacaggtggagcaaggaatagtatgatttttcttttcagttcctcagatgtacctaagatgcagatgatagggtgcaaccttgtcataagccaattaatgtaatgcatattaattacaactattgtataattaatgtaaagctcagtcttctataaggtgattcaagtatatagatatcagatgtggggcattttctcttagtccttctataatctccccccaaacaatcaagtgtttgccaagggcctatcttgtaaccaacgctttctgttcctctctactggtacagtgtgagaagggacagtgatgctgaccctacttagtgacttggcattttggaatttgttcatcctacttggtagcaggaaagtttcaccgcatcaccatttgtagtcctcctaaagttttggaggtgagcaaggggaagtagcaatatggagtcagtcaatcccagtgccctcttacaccatccttgccaagaatccagacttggaaaacagagagattattttatcacagcaagtgataaatacggcttttgcttctgaataaagcagaaactgacaaatatattcatttgaaatagtctatgtgagctcatgcctgtaattctagcattttgggaggctgaagcaggaggatctgttgagcccaggagttcaagaccagcctgggcaatgtagtgagatctcatctctacaaaaagttaaaaaagaaagaaagaaagaaaaaagaagttagctgggtgtggtgatgtgtgcctgtagttccagctacttggaaggataaagtggaagaattgcctgagcccaggaggtcaaggctgcagtgaaccatgactgtgccgctgcactcccacccaggtgacagagcaagtccctgtctccacaaaaaaaaaaaaaaaaaaagatttatgataagttattagtttttagcctgctttttaaaaattcaggaatagattatggccgtcatactatgtaaatatatacacatctactttatcctttccacacatgcatgatatctttcacaaggatgtattatcatttatttaatcagttccctattgtccaacatttaggctatttctggtattttgtaattctaatgttgaagtgaacatcttttaaatatatctttgcatatttgtgtgagtttttctataagataaatttgctgagttaaagggaatatgtatctaaaattatggtagctatttatttattcaacatttactaagtatgtactatatgatagggtttgtgcttgtttatgacttagtgttgagtttacaacagccaacaaaacagacaagagccctgctctcatggaggctacattttattgccaaattacaacaaatggtatttggttaattgactagctatttggaaaaacatacctttactatcctcctcacatcatacacaaaaaccaattgcaatttaatagacatgaaaagcaaaactatgcaataattaaattacaggagaatattttttaaaccttggaatagaaacacaaaacgcagaagaattgatagatatgagtagattaaaaattaaaactttcaaatgatgtaagatacaagatacaatgttaaaagacaaatagcagagcagaagaaaatttgtaatatttatagcagataatagactaatggacataatgtgtaaaaagtaactacaaattagatatcgacaagcccaagagaagaataaaaagaaaattgtaaacatgcatttctcagaagaagaaatgcaaatgaccagtagatatactgaaagttgctaaatcttgctaatgatcagagaaatgcaaactaacccaacaggttgaattttcatttattagactgacagaattaaaaaggcaagggcatacacaattgctcgcaaattctgctggtgggagtctaaatcgtcaacgggctggagcaatttggaggtgtttctaattgtgcatggttttttgacccagtaatattacttctaggaactggtctttcagaaacccaaagatttatatacaaggatattcatggcgtgttgtttgtagcaggaaaaacatggaaacaatgtagaaattcattcttaggagaatgaggaataaatatagtatctcataccacagaccatgataagatccctgaaaacaatgaagtagatctgtttgtacttgcttgaaaagatctccatggtacactgttaaatggaaaaagcaagtcacagagtaatacatgtactataatagcatttacatgaaaaggacaacagccaaggggtgtgtgtgtgtgtgtgtgtgtgtgtgtgtgtgtgtgtgtgtgtgtctgtacatgctggggagagagtaagatggagtcaggagggacaggggtgggaaagtggggagacttgcaatcagtacatttttaaaaagtgatacaaagctgctcctgtttttcatcctaaagacatcaaattatgaacattcatcaaagttctcttctttttcaggtgcagccacgatgtatacaagatacaaaatagtacagaagcaaaatcaaacctgctatttcagcactcctgtttttaacttggtgtctttagtgcttggattggtgggatgtttcggaatgggcattgtcgccaattttcaggtataatctggagctttttcagttatgaggagtggtggagtgtatgtgtctgaagagagcagcagaaatgcaagaggcacacttatgccattatagccattaaatgcttgatgagtttacaataagtgggttagtttgctttttagaaacctttaacatttggaaatcagggccaggtgtggtggctcacacctgtaatcccagcactttgggaaactgaggtggatcatgagaccaggagttcaagaccagtctggccaacatggtgaagcctcatttctactaaaaatacaaaattagccaggtgtggcgtcacatgcctgtaatcccagctactcaggaagctgaggcaggagaattgtttgaacctggaaggtggaggttgcagtgagccgagattgtgccactgcacttgacagagcgagactctatctcaaaaaaaaaaaaaaaaagcatttgaaagtgagttctgatacttgggagaaatggggtgcacatttgcatgattatgagagtgtgtgattcagaggaggccttgggctttgcattgctccatgttgtcattgatgtggtttgatgtgttgggagagctacttcagctactgtgatgattttgttaagagtgtgaaaatatttgtatgtgtttaccaattctaccatttaaacctctggtattcaaagaggaggctcccggtgacatttctttatatttttatgacagtatgcattttgtttttcataacaacaaacatttattgaaattttcctgtgacacatgtttaagaaaatattccatattttaaccatacaattataataaaagccttgtaagataggcactattattttccccatttatcaatggtaaaatggaggcctagagaggttaatacttgcctaagatcagttgaataatgcatggcagaggcgagctttgaattgaagtcatcttcctagagcctgtgagagctatcctcaatgctaacatgaagatatatctgtgacaaaaaaaccaagtacacgatgcatagttctaccatcaggatgcacacacacacaaaatttaaaaaggaagacctagagtggtataatttgtctagtacagtgtggttatggtttaatgggggctagtatagatatatcactttatcctctgactaaccacatcatgagagatacagatgtcagtttttaaaccatttaagggctgactttaagaagaaaacttagatggttaaataatttcaacttttggttccccttaagtcttcaatgatgtgattaaatccacaaaaaccagaaatagaatcttaacttcccaaggagcaaagtgtttgacttgtcattgttccgataactgtatctttacaacttccttgtttggtatcctgtaattcattttcgtcatatcaggagcaaaccaacttgagctaactcaagatgattttgagatgtgtgggcaagagagagtgtgactgcctcttttttttttttctttttttgtagagacagagtcttgctctgtcgcccaggctagagtgtagtggcgcgatctcggttcactgcaacctccgccccgggttcaagtgattctcatgcctcagcctcccgagtagctgggattacaagcacccaccaccatgtccagctaatttttgtatttttagtagagatagggtttccccatgttggccaggctggtcttgaactcaagtgatctgcctgccttggcctcccaaagtgctgggattacaggcatgagccaccgtgcccagccatggtgatttttcttgagttgcaataaatcacatttttgagaatttcacagataatctttttcccaaatgggtgggtgagatggctactttttggtgtgtcctcactaacttctgtcaatactttattttccctcagaaagttttctttttgaaattctgtcatttgtggcaacatggatgaacctggaggaccttatgctaagtgaaataagccagtcacagagggacaaataccgaatgctgtcacttatatgtggaatctaagaaaatcaaacttacaggagagagtagaatggtgttacaggagtgaagaggaagatgaggagcggggaggtattggtcaaagggtaccaagtttcagttagactgaattaataattctggagatctattactgcacagtatggtgactatagttaataatagtgtattgtatatttcaaaattgctaaaacagtagattttaaatgttctcatcacaaaaaaaatgaataagtatgtgaggtgattgatatgttaattaccttgatttaatcattccacagtgtaaacatacatcaaaacatctacagccaggtgtggtggctcatacctgtaatcccagcacttagggaagccaaggcaggaggaatgctttagcccaggagtttgagactagtctgggcaacatagggcaacacagggagaccgtgcctctggaaacacacacacacatacacacacacacacacacacacacacacacacacacccctataagcctcataaatatgaacaattattattattttttgagacagagtctctctctgttgcccaggctgcagtgcagtggcgcgatcttggctcactgcaacctccgcctctcaggttcaagcaattatccctgcttcagcctcccgagcagatggtattacaggcacctggcaccatgcccagctgatttttgtatttttttttagtagagatggcgtttcgccatgttggccaggcatgtcttgaactcctgacctcaggtgatcctcccacctcggcctcctgaagtgctgagaggtgtgagccatcgtgcccagcctataaacaattattatttgtcaattaaaaataaaaacttttaaagtttcctttttagaaaagaaactttccaaggtttaactctgtcagtattcacatattctttttttttttttgaagctgagtgatagagctttaggggttttttttttttttttttttttttttttttttgagacagagtcttgctctgtcacccaggctggagtgcagtggcgcaatctcggctcactacaagctctgcctcccgagttcacgccattctcctgcctcagcctcccaagtagctgggactacaggcgcccgccaccacgcccggctaattttttgtatttttagtagagatggggtttcaccacattagccaggatggtcttgatctcctgacctcgtgatccacctgcctcggcctcccaaagtgctgggattacaggcgtgagccaccgcgcctggctgatagagctttattaaactattctctctctctctccctctctgttgttattaccttttaaattaccaagagagtttctaaaaagcaatccagaaagagtgccgggttttaactttatcgaaaattcatgtctgatctaaacatcatttccctgcttttttgattgattggttgagaaagggtctcgctccttcacctaagctggaatgcaatagcacaatcatagctcactgtaaccttgaacgcttagactaagccttgaactcctcctgtctcagtctcttgagtagctgagactatgggtgcatcaccatgcccagctaattcttattttcacttttgtagagatggggtcttgctatgtttctgaggctgttcttcaactcctggcctcatgtgatcctcccatctccacctcccaaaatgttgggattacaaacacaagccaccataccctgtcgtattttatttttcatatataacttccctgaatctatatgcctatgttaggaatcttatttatttatttatttgtatttgtatttttacctttattttttgagacagggtcttgatctgttgctcaggctggagtgcagtggtgtgatcatggctcactgcaatctctgccttgtgagctcaagcagtcctcccacctcagcctcctgagtagctaaaactacaggttcatgccatcatgcccagcaaatttttgtagtttttgcagagacagtgtttcaccacattgcccaggttggtcttgaactcctgagctcaagtgatacacctgccttggcctcccaaagtgatgagtttacagacataagccactgtgcccagtcttttatttatttttattttattttttgagacaaggtctcactctgttgcccagactagagtgcagtggtgctatcatagctcactgcagccttggtctcccaagctcaagtgattctcccacctcagcctccgaagtagctgggactacaggcacacaccatcatgcccatctgattttatttatttatttatttatttatttatgtatttatttattttttgagatggagtctcgctctgtctcccagactgtatgtagttcagtggcacaatctcggcttactgcagtctccacctcctggggtccagtaattctcctgcctcagtctccctggtagctgggattacaggcacgcgccaccacgcctggctagtttttgtatttttagtagatacgcggtttcaccacgttggcgaggctggtctcaaagtcctgaccttgtaatccacctgcctcagcctcccaaagtgctgggattacaggcgtgagccacagtacctggcccatgcaaggtatcttaggtatacagaaactatatgatgtattgcagagtcagtgcagtcatatttgaatataacaccaatcatgtaatcaatttctccccttatttctaggtttgatactaggaaatacatttccttagaaataagttaaaaggtctttttttttttctgcacctccctttcttatgtggtgaatgaaaatttaatatcaattcatttgtgctccagcttgaggttgaactgtctggatggcaaatattgtggtgctggggaagcccaggtcagagggaagctgggggaagagtgtgttcaccgtgagctgaggccaaggggtggcctgtggccaaaaccaggctctcctggacaacactttaacttgccctttgcaaagcttgcatgttcaagcttaagtcaagacccagtggttccatctaaatgttcctcgactggaaggttgtgcccagtgcacatttgaaaggagctgaggctgggtgtggtggctcatgcctataatctgagcactttggaaggctgaggtgggtggatcacctgaggtcataagttcgagaccagcctggccaacatggagaaacccccgtctctactgaaaacagaaaaattagctcagcgtggtggtgcatgcctgtaatcccaactactcgggaggctggggcatgagaatcgcttgaacccggcaggtggaggttgcaatgagctgagatctcatcactgcactccagcctgggtgacagagcaagactctgcctcaaaaaaaaaaaaaaaaaaagaaaagaaaagaaaagaagggagccaaaggtgaggtgcattttgagtgtgtagtatgtacagggtctgcaccaactttctgcctagactggcacaggggctgccttctggttgaaatggctggttacaggatggcagggacagggaacttgtttagaagctgcctttcaaaaaaaattagccagaactgggtgtggtggcatgtgcctgtagtcccagctacttgctgggctgggaggatctcttgagcctgggaattcaaggctgcagtgagctatgatcatgccactgcactcccacctaagcgacggagtgagaccctgtctcaaaaaaaaaaaaaaaaaaagaagaaaaaagaagctgcatttgcataacaaaagcagtggttttacttagatggtgtgttcatttgaggtgccttgggagggatgagtagagattatcagggagcagggagcctaaaaaccccaaaccacccttggcaccatcatggaacgagtcacgtactttggttttttttttcaatcatatcataccgaagtttattgatgacatcaaacaaaaatttctgtaacaaaaaaggcagggttgggtgcggtggctcacgcctgtaatcccagcactttgggaggccgaggtggacggatcacgagatcaggagttcgagaccagcctggccaacatggcgaaaccccgtctctactaaaaatacaaaaattagccgggcgtggtggcacgtgcctgtaatcccaactacttgggaagctgagacaggagaattgcttgaacctgggtggcggaggttgcagtgagccgagttcatgtcactgcactccagcctgggcagcaagagtgaaactctgtctcaaaaacaacaacaacaaaaaaagaaaattgtatatgatatgtatcctataatcttcactgcaaacatgcaagactgagatgattatgcccatttttagatacagaaatcgaggctttgcagtaaggtcacagagcctcatggtggagtcaggacttttaatccaggtgtaccagactctgaagcccaccatactcaaccctcccacctgtaaggcagacctcctttccttgtcccatgagcccaggttcgctgtggaacaaccaactttttggcattaatttcagcacctggagggcttttcttttggtagtcaaacagccacattttccaagaagtggtgcatctgtgatgaccaatggctcaaagcagcccagagtgagagtgcttgcggttcgatgttgacaaacccacccagagtaacacacatttatgactttttctccaggagttagctgtgccagtggttcatgacgggggcgctcttttggcctttgtctgtggtgtcgtgtacacgctcctacagtccatcatctcttacaaatcatgtccccagtggaacagtctctcgacatgccacatacggatggtcatctctgccgtttcttgcgcagctgtcatccccagtatcctttttcacatttgtgccttgttaaaggaataaaacattcagtgacacttgttaaagaagggtaatgaagactttatagggaccgctgcaatgagttctgacagcagggcggagagattgggctcaactctgaatacagcattggcaagtgcgaatctatagccaaggagtaggatgaggtcagtgaatggaaaagtactaaaaggaaacctcaaggatgagggggaattctggccaaaccaacctaacaggattcttattgagtactggccatgtgatcagacatcacctgggaagggtggaggaggaggaggaacccaatcagatattgagtgtgatcagatatgagggtggggggtccttgctaaactgacttagccagggttctttgctaaaactggatcttacaaggaagtgcacagatggacctaggagaagtttcaggggcttgactaaagttcagccaagcaaaggatctttgtcaccgtgtcttagcaaagcttgacacttcccttccccacaaccaaaaaaaaaaaaaaaaaaaaagcaaaggataacaaccaagtttccacattttttcagaaaaacaattcggataaaagtgtagatcaagctgggcgtagtggctcacgcctgtaatcccagcactttgggaggctcaggtgggtggatcacctgaggttgagagttcaagaccagcctgaccaacatggagaaaccctgtctttactaaaaatacaaaattagtcaggcatagtggcacatgcctgtaatcccagctacttgggaggctgaggcaggagaatcgcttgaacccgggagatggaggttgcagtgagccgagatcacaccattgcactccagcctgggcaacaagagtgaaactccgtctcaaaaaaaaaagtgtagatcattaagaaaatgtctcaacattgtctaattagatcaaaagtctctttgcggggaagaatggtatgaaagaagggtggaaaatgtaggaacactttagtctctgtttactttccttctcacagggccagtttcatgagccatatgaaaatatttatttttctttgtagtgcttggctaaagacaccaaatattgatattgtactcaaagtaatagccccacgaagtccctcaaggctaaactctccccctccctgcacgtcgtaggtggcaagacagtttgatttactcattcatgtgaagaaatttctaaaaagctctagatcacttattactgagtaaattaaaatatgtttagccttttctttttatagtcactgatttcattttcaaaatgaaatccattttattttctaactcagcaatctgaaaggaaatgaaaatataaatttagcgtgcttgtagattctgatttagaggaaacgaaagctttttctttccctttttcttttctttaatgaagtatttaacaaagaaaaaaagccgtggtcttaaagagttgcagagttccccatctttcaaaataccatctgtagtcatatcagagaaagcttcagggtcattaaacattgatgactaatgtcagattgtaggaaaatcggaactatgttatcggcggcaattttgttagtctgggttgagttacggtataaagtgggcaagatggagtgaaaacacatcacttgcttctaaatattaagctttgtgtttcttttctaaaatagaaactacaaaatgtgaagtctaagtatgattttgggttttcttccatcttggggaaggacatttttaattacaaaatttccaggcacagagtagccaaatcctagtaccgagaaatttaccaacaaaatatatacccttgttcctaagatagttgcttctcaaatcccttgtcttacttataggttaaaggaacactttctctttgaatatatctccttcaacattttatcttgtgttagttgtaaaattcataatagtggttgtagtgttacaagcaaagtttcttgatgcaggaaaccttcccttgcttccaacttcggaaacagatccctagatatcaaagtcagagagttttcacaaaataagcatttcaggcctcagagtttcacttactaataattctcatttctagaaagttttttttttttttttgagacagagtctcactctgtcacccaggctggagtgcaatggtgcgatctccgctcactgcaacctccgcctcccgggttcaagcaattctcctgcctcagcctccctagtagctggtattacaggtgcccaccaccacgcccggctacttttcatatttttagtagagacgggggtttcaccatgttggccaggctggtgtcaaactcctgaactcaggtgatccacccgcctcagcctcccaaagtgctgggattacaggtgtgagccactgtgcctggcctctaggaagttcttattataagtcatgccaacaggaagcagccccatacagaaaggggttataaccctatgtcagattaacttgaatgaattcatccacacgaaaagatcttctgtcttaaacattagtgtggtatttatatttccttacaaagaattgacagcatctttaaataggctaggtgcggtgactcacacctgtaatcccagcacgttgggaggccgaggcaggtggatcacttgaggtcaggagttcgggaccaacctggccaacatggtgaaatctcatctctactaaagttacaaaaattagccaagcgtggtggcgtatgcctttagtcccagctacttgggaggctgaaggaggagaatcgcttgaaccaggagtgggaggttacagtgagccaagattgtgccactgcactccagcccagatgacagagtgagactccgtctcaaaaaaaagagttgaaagcatctttaaaatgccctggtttcttcttactgcagtatttctgtataatagcctcatttgactaccgaagaaaccgaggcacctagtgaggcagacgttagaatcctgcttctaaacctttcctgatgaattatctgtcttgcaccgggcttctaaagcttctgaaagccttcgcagaactcaccaacagcataaagtccaggttcctctgcatcagacccatgatctgagacctcctagttcttcatccttgtttttagggcttctccctcaggcttggttgtttgttgtcctctgtttttaactgatctctacttggctggattatcctcctccactttgtcttgctagagctgttggttcaacatggtacccacatgtggcttttgcatacttgaaatgtggctagtccagattgagatgtgtcctaaatgtaaaacatatacctgatttcaaggatttgataagaaacagaagtaaaatatctcaataattttttatattattacacattgaaatgatatcatcagcaatattatttgatatattgagttaaataagatgtatgttgtttatcaatacataagatatgttttgcatattatgtatatcttatattgacaatatttttatgtgttgggttagataagatatattattaaaattaagttaggggtcaggcacgcctgtaatcccagcattttgggaggccgaggtgggcagatcatttgaggtcaggagttcgagaccagcctggctaacgtggtgaaaccccatctctactaaaaatagaaaaactagccaggtgtggtggtgggcacctgtaatcccagctgctgaggaggctgaggcaggagaatcgcttgaacccaggaggtggaggttgcaggtgagctgagatcacaccactgcactccagcctgagtgaaagagcgagactccatctcaaatacataaataaataaataaatttggatattagaaaattaaaaattacacatatttctgtgggatggtgctgctctagagagctccttaaacttcacaacttacattaagtttcactgaatgaagctttctcccattccattctgaattaataattttcccttacagtcattgctgtacccagttcttttctgtctactatggtacattctctgggtctggtccaacaaagttgtgatatttctgagagctgagaccaagttttcccttctcccacccccagaccagaatggtacctggtgcactgaagatggagctaagaataaataaacgaaataattaagaggcttttaaactattagaaacagatgtgaggtgatgaaatgatcagagaatcttctgtgctctctacttcttttattttgagaatcagaagcattaaactctgcacaatttgcggggggttggagttaagagagatgacgctgactctgaattcagaggaggctctaaactttccttggctcaacattttttttttttttttttttgagacagagtctcaccctgttgcccaggttggagtgcagtggtgcaaattcagctcactgccacctcccaggttcaagcgattctcctgcttcagcctcccaggtagctgggattacaggtgcacgccaccatgcccagctaatttttgtgtttttagtagagactgggtttcaccatgttggtcagactagtctcgaactcctgacctcaggtgattcgcctgcctcagcctcccaaagtgctgggattacaggtgtgagccactgcgcccggcctaacattttgaatttctaatattttgcagactttttagagcatcccatttctctctagctttcttttttgcattctaagttcaatcaaaatggttatcactgccttcatgcagaaagtattgctggtggaagataggagcctcagcccctggcattattaggctggactgtaggcatgtgtcagtcatccctgaagtctgatatggggcgaatctctttgatttgccagatctttggtccaggaaggaagggctcaccttatacccaattacccaacagaagtctgttttttaaagataatagtttgagtttctgtagcttgtttttgtatatgagccttggcactttggaatttaaaattttccttaaagctgttaccttggaaatagtattttaggccgggcacggtggctcatgcctgtaatcccagcactttgggaggccgaggtgggcagatcacctgaggtcaggagttcaagaccagcctgaccaacatggagaaacaccgtctctactaaaaatacaaaaaattagccaggcatggtggtgggtgcttgtaatcccaactattcaggaggctgaggcaggagaatgcttgaacccaggaggtggaggttgcagtgagctgagatcgcgccattgcactccagcctgggtgacagagcgagagtacgtctcaaaaaaaaaaaaaaaaaaaaaaaggaaaggaaaatagtattttagggaaaaagtatttttattcagtgggaagtattcaaaaagaaccatcctggactgctgcgtcagtcattttgaccgaatttaaacagctagtttaaatgggaagatccagaaacatgtagggttgtgcaaaatgtagtgacaagttttaataaattttactatacacactggaaaactattgcgaaggtatttccgtgttgtgatttaactctcatcattgaatttgaagtttgagtttataagaagctaatataactggtttgattgtagaaatgttggtattaacattttaattgatgatagaaatgttggtattaacattttaacaccttataatgattatgttattaggagaataatgtagtcttaacattaaaggaactgttgtgtgctgtagtttccttaactgtttacttctttcagtgattgtctgtgcttcactaatttccataaccaagctggagtggaatccaagagaaaaggtaacatttaagttgttgtgaatgtggttgtcggacgtggttatgtgagcttgtggccaggctaggcatagggaagatcactgccgttccttagaacaagttgcaaaatgtcaaataaacatggcatgtaatcaatttactgtccaatcatttggcagtatgtagtaattagctatcagggtaattccaaatgcttcctggaagtattttcaaaattttgagttcctaatttctttctttcttcttcttcttctttttttttttttttgagacagagtcttgctgtgttgcccaggctggaatgcagtggtgcaatctcagcttactgcaacctctgtgtcccaggctcaagcgattctcctgcctcagtctcccaagtagctgggactacaggcacctgccacaaggcccagctaatttttgattttgttttgttcttttctgagacagagtctcgctctgtcacccaggctggagtgaagtggcgtgatctcagctcactgcaacctttgcctcctgggttcaagtgattcttgtgcctcagcctcccgagtagctgggaccacaggcgtgcgccacatgcctggctaatttttgtatttttagtagagacagggtttttcccatgttgaccaggctggtttggagctcctggcctcaagtgatccccccgtctcggcctcccaaagtgctgggattataggcgtgacccaccgcacccgtccctctaatttcttccttttctttctttctttttttttttttgagacagagtctcgttctgccgcccaggctggagtgcagtggcacaatcttgactcagtgcaagctctgcctcccgggttcatgccattctcctgcctcagcctcctgagtagctgggactataggcgcctgccaccacccccggctacttttttgtatttttagtagagatggggtttcaccgtattagccaggatggtctcgatctcctgacctcgtgatctgcccacctcggcctcccaaaatgctgggattacaggtgtgagccaccgcacctggcctttaatttctttcttaaacacttcaactatctatctttagtaaaagagggtagagggacagtgtgaatgaaggtgtttggtggtgaaagggagcgtggaatgttaagtagagaggatgataccagctccagtgtggtggatagttcatttcaggatagagtgagaaatcactgcagccggggataactgtgcaagggtgtagtggctgtaagaggcaggcagagaggcttgtacttggcctaggtgaccagagtaagactttgaagactttttttttttttgagacggagtttcgcccttgttgcctaggctggagtgcaatggcgcgatctcggctcactgcaacctctgcctctcaggttcaagcagttctcctgtctcagcctcccaaatagctgggattacaggcactagctgggattacaggcgtgcaccaccatgcccagctagtttttgtatttttagtagagacgggatttcaccgtgttagccaggatggtcttgatctctgcacctcgtgatctgccctccttggcctcctaaagtgctgggattacaggcgtgaaccaccacgcccaacctgcagactttcgaacggtaaagcaaatagaaagagtattattagatgagtgttagacagaagcaatgcctgggatggcttggagagcttggcattaggagggcaaggagaaggcagttctactagttcacgtttcaaataggggaaatctgatgggtgttggcaaatgattaacacaagaatgaagtggcatgatgaatcaaagatgacttctaagtttttatcttaggtgaaccaaagaatttattcccttgaccagaaataaggcccctaacagggataaataatttagtaggtggaagtggatgagtttggttagagttgatgattctgaggatatgatgagatatcgaggttagaaacatgggcctaggccaggtgctgtggttcatgcctgtaatcccagcactttgggaggctgaggcaggaggattgcttgagtccaggagatgaagaccagtcagggtaacacagtaagatcctgcctctacaaaaattagccagacgttgtggcatgcgcctgtagtcccagctacttgggaagctgaggtggaaggatcacttgcactccggtgggcctagacttctggtgggactgggagtcgtcagagtgtagggtagagttgttagagtatggggtagaccaggacattttggaccaagcatcagaacacatggaaccaaatgtttgacattgagatcaacccatcctgttagatacctgtagtagtggttcatctagacgccttataggagaatcaaggatgccccaggaaagaagagagttagtgagagacagaggattctttcccccaaggatcaggtggaagaatacctccagcaaaggagaagtaaagggatcatggaccagagagaagaactagacttgtgctgtatggtagacctcattgatgagtccctaccacatgcaagactgtgaaagattatagagggcagggtggccatgggatagaggatcctgagggattttatagttcagaggggcaaacagccagttgtcaatggctaaatgtaatactttgaagaataaaaaaatgctgaactggacttcagacaacacattgtggaaatgcagaagcaatagcaattaatcctaacgatggaatgagaggagatacgatcccagagactaaaggacatttttcaaaggcaagggaaatggctaactatggcatatgcagctgaatagcctttaggaatgaagtccctcaatttgggcaataagggagtcagtgatgtttgtcaaaaagtagtttcagtaaaacgccgaggttagaagccaatggcaagaagttaaatagtgagagggatggttctttcattcagctatcaaccaaatgtttattgagtcctgttctggactggaggtaagaggtaaaggaggaacaccagggtggctagaggagacagcaggatttcccaatatggagaactctggcaggtaatggaagcctgccaagacaagagagagacagaagatggtgaggaagagaatgatccagacaggagatcaaaaagtgcttcttggccgggtgcggtggctcaggcctgtaattccaacactttgggaggccaaggcgggtggatcacttgaggctagagttcaaaactagcctggccaatatggcgaaaccctgtctgtactaaaaaaaaaaaaaatttttggtgtagtggcacacacctgtagtcccagctacttgggaggctgaggcaggagaattgcttgtacccaggagttggagagctggaggctgcaatgagccgagatcatgccaatgcactccagcctgtgcaacaagagtgagactccatctcaaaaaaaaaaaaaaaagccttctttaaaatctaaccttaaaatggtcaaattcgtcaataggttagacctaggcaaaaggcaggtttttttctttcttatatatggggaattagccccatcatgcgaagggggttcagttcctctttccgttggagagaacctctttctgaaagtgagaccgcatagcggagcagttcaggtgtactttacttttcagccactcgggggagaccttctatcacaaacccgctgctgggaagggcttatcgaagtatattcccaggcagttaaaaatctgttatattccactttctatcttaaaaatgtgaaaagcacatggttttctattcactccataaatgactgcgccactcttgcatttccttctgttcctaatatcaaaggatgtaaaaaaatttccctttacattaattcactgaataatcatttaggtactgcctcaaacttctgtgtagtgctttacagctttcacagcacatttatatgcagtgacttacttggtagggggaggtgagaattataatgtcactgtctcatttcacatagcaaggatattagggctttgcctgcattcaggactcttggttccatgtactttcactaatatcatgcttaagaaattccccccaaagttctgcctttatttttagaagccatcttccttgttcagggatgatacgggatgtggcaggtcccctggtactggtaccagaaggaggaagcctctgttctgtatctcctactgtaggctggtcaggtcctcctcggtgtgacctagcatgaaaacagtgggtgagtgtgaccatgacaaggagagtgaagagtgacgctcggagggcttggtgtgcctccactcgatctgtctggatgaaaacaggatcaaagaaaacaactgtcaccatggagctgccctgtgatccagcacatttacttacccttgtagcctacagcagtttggggtagaagagcagtgggctcagccctcaacagcacatgccaagggcagagcagcccatgtatgcagcttcagaaggcatgggggtgtagggagttaggggtagttgctcatttcagcagagcagaaagtgacgtaggaaatcagagggggcacactgacagtccccaggcctcatttggcatgtgagctaacatcagaatgcagacatgcatatttgactcagagttttatttatttttattttattattattattattatttttgagacagagtcttgctctgtcacccaggttggagtagagtgacgcaatcatggttcactgcaacctctatcccccaggctcaagtgatcctcccagttcagcctcccaagtagctgggactgcaggcgcaggccaccccacccagctaatttttttttgtctcgttatgttgcccaggctggtctcaaactcctgggctcaagtgatcctcctgcctcagccttccaaagtgctgagattacaggtgtgagccattgcaacagagttttaaaattagtttccagcactgaaaaatcaggagatatcacacacagacacatccacagacacacagacacacacacgcacacacacacacacacacacggttttgtttttttaaacccctttgaaagcaacactagtgtattattttcccatggaattgagctgatgaggcgtgggctccctaacttccctctcttttcacaaccatcagttttatttattattgttaattttctggcctccataggcaactgagtttggaacatctgattgaagccattctccttggcttccattctcccattcttgcctccaagaagatatacagttaacatgtggatgtccattattagcattttctttgtagctgtatttaccttgggatgttaagcagaactatttcctgaatgatcatttctatataaacagggaaacacgaaacctaggggactagttggccaagttcatctagatgtgtacacactttctttggaacaactgcgagagtgcttgttaagcatagccttacacttagggattctcagcagagcgagaccaagtcatgccttgtatggaaatttctttcttctgttgagtccaaatttgcttcccagtctcagccattttgcagtccttagtctaccttttgaagtgacaaactaaatcttaaaacaagagtttgtgcgagccagaaagaactttggaatacctgccttcgcattctcagtgggcaggtgccctgacacttagtaacgtggttgtgcttaccgtatatcctcaaagttctgacttatgctcactggacagctttttcctttggttgaaactcctcattgtatttcagtatgtacattaaagtgagtctttttcggctaaattctgtttctttattattgcattaggattatgtatatcacgtagtgagtgcgatctgtgaatggacagtggcctttggttttattttctacttcctaactttcatccaagatttccaggtaggtgtttatcaattcaaatgttttaaattgcggacaattaggattagtaaaaatttgcagaagacattttgcatttttaaaaagagcactttctttttttttttttttttttgagacggagtctcgctctgtcgcccaggccggactgcggactgcagtggcgcaatctcggctcactgcaaaaagagcactttctttttatccttaatgtgtttgagaaaaatctgtaaggattgtgcaacttcatgtgttagcttattcccaatgggaggcatctttaatagctctcccaccaatgagattttcatatgtcctctgctgtttgatgttaatagtcatgtatcctggttgttttcttttaggaggtctcacttactagttccaaataatacaaagtaaatatatcttttttaaaaataaaagtatgccaggtgtggtggttcacatctgtaatcccagcactttgggaggccgaggcgggcagatcacctgaggtcaggagttcgagaccagcctgaccaacatggagaaaccccgtctctactaaaaatacaaaattagctgggggtggtggcacatgcctgtattcccagctactcaggaggctgaggcaggagaatcacttgaacccgggaggcggaggttgtcgtgagctgagatcatgccattgcactccagcttgggcaacaagagcgagactctatctcaaaataaataaataaatgaataaataaaaaataaaagtgtgttgttcaaaaaacattcccaaagcagatagaagatgggactatatcagatttgtccacaggaaaaatcttacattttgaaacaagtgaattattagctcaaaggatatagaaagccaagaaaattctttaggacctgactcaagcatagcacaaaccatagtgagatcattccttaggtggtgcagagctgttggaaatgtcattgtcaacgctgggattgtttaacttcttttaaacctttctctttcatttttaaaaatagagtgtcaccctaaggatatccacagaaatcaatggtgatatttgaagaaagaagaattcagtctcactcagtgaatgtcgcaggccatttctaaaagtgctacagaggacagacagggttttgaggccaccctgattattgggatgcatctgcagcacatccaggacttgaatttcattacgagttcctaatagttgtatttctaaagatgtgtttcctagagaatgtacagccttatgacactgtagtgatgtttttataattttctaagtagatttttttatattaacaaattcatatacagaaaaaataaggtgttacaaaaaatggagagctcttatttttgtacagattctgtcgtttttgttttatttgtgtgagatttatggaaatacactaaatgagtaattcaggttcagtacatttattacaaagtgaaatcaggggatattcatttgtaaattttattcttagtgaatgaactgtataattttttttatcaggagagcacttataaaattcaatttataaagatcatatacccaaatcataaagatttagttgatacattaacactaagatactctgatttttagccgaactaaacaaagtgcttctactgagaggcctttataccaccatgtacagtaactctaagtgaatacggaagaccttggttttgaaattctgccaccttgtttctccctgctcatgaggtcgcaccttttgctcttgctgctaattgcccattcgtagtgggtgtaatgccaggtggaatggtttcaacaagtcaggtgaaaaccatcctttattgttgctggcacaacttgatatatagtctgactcagaactgaagctcacatctcaaattcatttcatgccagtaaatgtggcaaagagaagaaaggcccaagagcgagacaagaagaatggagaagggggcagccaagaagaacttctgggttcagggtactgtttatttgctccttctcttcatgcctgtggctggatgtcccacaacactataagaaatataagtcaagccctttgtgttaagcaagaactacagactccatcttttcacccaaatcatgaatgaccaataaaaagcaagttattccagaggaagaagcagcccttgaaatgttaaggcttaggcttgaaaggtgaagagcaggaattctctctttcaaatcctagagcataaacccatgtgtggccaagtgagatcagccctcaagggcacatgccaagggcagagcagcccatgtagacagcttcggagggcatgggggtgtagggagttcggggtagctcctcattaactatttgttgggtgagtaaaggggtgaggctcagtggcaggtacctctgcaatgacaagctgcctcccctctatgtgtttagcatatgttattagaacatgtccgacacccctaccgctgccatttgggccctttaataaagccaagtagagaaatctggcaataaaaggcaaatgtaagcatgctttctttaagacgcatcataaatggttttctttaagtgaatggaagagtttgacagagatacacctttgtaagaaaacattaagaatgctggctggctgtggtggctcacacctgtattcccagcactttgggaggcctaggcaggaggattgcttgagcctgggacttcgagaccagactgggaaacatggcaaaatcccatctctacaacaaaaatacaaaaattagccaagtgcggtggtgtgcctgtagtcctagttacttgggaggctgaggtgggagaatcacctgagcccaggaggtggaggctgcagtgagccatgccaatgcactccagtctgggcaacagagtgagaccctgtctcaaaaataaataaataaataaatgaataaagagaatgctaatcatttctgggttcactgcgactcactgtagtgctggggatcccccttgtaacactggaactgaaagacagtgatgaaagctatgtcaagcattcattattctgaagaggaggagaaatgccacatacctttcccatgggacctgtggtggaatgaatccatacttctgcctcacttcgagcagacttttgttctcggcgctcctcacgatggagtttcatgcttcattttcacatctctctgcacaattagattgggagctccttgagggcagagtacgtgccttaatctttatctttgtaatgccacaatgaacagagtgcctcctggtacactgtaggagcttaagaaatactcactgaatgcatgaatgaatgaatgaacaaatgaaggaatgactaaggatgtttgtagtgctataatatagaatgggatttactctgctttaccagttagtttcataataaacaaatagtctgtatcgcctggtaatgttgactgtttttctttgtgtactgtaaacatttcagttgtttcggcatcaccattctatgacaacaatcttcaacctggacagttaccacagaaaattgttacacgggctagaccaaatggtacacctacctgtcttggcaaactgagaaggccaaaaaaatcactccagacaaccatattcagcagattccatgcgacctctaaacccggtcttattcggattttggtattatttctaatatccatgaacttgcatttccttgtaccttatggctgaaatagttaaatgaaatgaaatatttattttaaaatttgtttttctgtttttgagatggagtctctttctgttgcccaggctggagtgcagtggcgcgatctcggctcactgcaacctctgcctcctgggttcaagggattctcctgcctcagcctcccgagtagctgggactacaggcgcccaccaccacgcccagctaattttttgtattttagtagagatggggtttcactgtgttagccaggatggtctcaatctcctgacctcatgatctgcctgcctcgacctcccaaagtgctgggactacaggcgtgagccactgcgcctggcccagtaatttgttttgctgttaaattagaaaatatcacttggctactactatgaagtagatttatctgggagatgattccagatccatttggactttataaaggtatgattacgatttaaaccttatgctttcttaattcatgtagttttccacgtgggcacgattggttcatcttcgtagattctcaaacgttagcatcagaagtttatgtcactcaagattcagagatgaagagatcagaaatccaacaagaaggagaaaagggaatcagaaatccaacaagaaggagaaaagggaatcagaaatccaacaagaaggggaaaagggaatctatattgcctcaagtaactgagacatttaggagtggaactggctttatgggggctggatctaaaagtgccattaggactccaacttctctttcctcctctcagctggcttcattctcaggcaggctttcccctgatagaagtgacagggcatctagaacccccagacccacaacctatccacaaaaagaggtggaaagaaaggacttctcaacagttccaaccacaagcccatgaattgtctcccattggctggcttggatcacatgccattgggaggtctgaggctctgattggtcagacgtgagtcacatgttcacctctggagcagggaggggtcaacaccgccgaaactagtgggctgatggtggctgaaggttgtttctcagaagaaaagggtggaaatgggtctctaacagacaaaaagcagcagattccactgtagaattaaaaccccctttcccttcataccctccccgcccaaaaggcaacctaactcgcttcacagtaaaccaaaatatacttgctaataaccttttcgaatttgaaagtaaataagccatttagataatacaaaaaccttgtgttaactccaaagttatgtttatatttttaaaaagttcttgttttcttatttagtgtctcttatttagaatcagttttcctgatttctaatcaagtgggtctttttttttttcttttttaacattaacactgaggattccacagaaattgcattttataaaccaaattaagtgcatcagtgttgtgctgtgtttgggtttcctaacattccttacatgtggcattgtcccatgttcccatttttactcagttggagacacactagtctggtgtttgagcctggaatgaggaaaggggagtgggaggaagataagtggtatcccattctctcccactgcctgattctggcaagccagtaagcccagccgtctccccacacacatactcttggtctggctctgaatgccccacattctccagtccagaatgtcatgcatctgcatcatgtctgttgcacaagagagcaaccacagcctcaagccctggaggagaagcctctgactctccttggtcactcccagcagattcatcttcatttttttttttttttttttttttttttttagacagagtctcgctcttgtcgcccaggctggagtgcaatggcgtgatctcggctcacagcaacctctgcctcccgggttcaagcgattctcctgcctcagcctcccaagtagctggaattacaggcgcatgccaccacgcccagctaatttttgtatttgtagtagagacagggtttcaccatgttggccaggctggtctcaaactcctgaccccaggtgatgcacccatcttggctccccaaagtgctgggattacaggcgtgagccactgcgcccggccccagattcatcttctaaaatgaagggtagcagttttccagacccatgttggaggtggcagtgacctccagagtccatgcttggaaaatgctgaggaagatgtcaacaatctgccttgtggtttaagacggggtggcgtggggtgcctggaaagcctgtggtttaggtagttcctcagcaaggagcactgctctgtgccccaccatcctcaaggccagttccacctctggacgactcagttacatgagctgataaagtctctaacttcaataaactggagttagacttcagatgattttacctgtaagagtcctgactgataatggatacacaagagttcccctaatatgaaaatacagtaaacaactatcatctagagtcatttttatttcatttttttcttttgcatttttttttcagtacagacttgccttcacaggaaagatcatttttatataagtggattcagctgcccccactcacaaccctcaccccctgaaccatttatttcaaaaaatttgagtaatattttcacaattcaaaactcaaaacaatatgaaaaggtatactgtgaaaagcctttttgcttttccctacctgcatttactcaattcactctctccttgcagatatccacttttttttttttttttttttttttaacgacagagccttgctctgtcgcccaggctgaagtggagtagcatgatctcagctcactgcaacctatgcctcctgggttcaagcagttctccctgcctcagcttcccaagtagctggtattacaggtgcccaccaccacacccagctaacttttgtattttagttgagacagggtttcaccatgttggtcaactcctgacctcaagtgatccgcctgccttggcctcccaaagtgctgagattacaggtgtgagccactgtgctcagcctaggtatccactttttatcagatttttatgaaaatacaagccaaaacaaatattttaacgttttccttttcattttcaccccaaattagtatactgtaagaacagttttgagccttacttttttgacatagcaatgtatcttggagatgtttcctttatcaatacatagagatctccctcatttttaaggttaatttgctttgttttataccttacagtattccattgtatggctgtgccatcatttatttagcaagttccctatctgatgagcaattatgtggtttccaaatttttgcaattacaagtagatgaccttgtacatacatcatatcacacatgtgcaaggaaatctctaggacaaattccagtgagtgggatgttggaaacttcatctgttattttgcaaatgttatcttgcctttagaacttttttacttgaatatttttgttaggaacctctttttcttttttgtttctttctttttttttttttttaaaggctggtcaagtgcagcagtgagagtggagaaggaagaaaaaaatctgtaactgggctgggcatggtggctcacgcgtgtgatcccaacattttgggaggctgaggcgggtagatcatttgagtctaggagttcaagaccagcctaagtaacatagcaagaccccatctctacaaaaaaatttaaaaaattagccaagaatggtggtgcaagctgtggtctcagctactcaggaggcaagaggggggtatcgcttgagcctggggaggcagaggttgcagtgagcagagatcgtgccactgcactccaatctaggctatagaacgagactttgtctcaaagaaaactaaactaaaataaataaatctgtaactggttgcgatcaattagttgtaaacaccactgcactcggacaagccaggaatctttgtgattacacacattttcttctaacctgaggatgctgaatataagttcatgtttccttggtgactcagtcatccatgactgtagatcaggtgcaaatgtggattttgcagtagatggtgtgggacagaggcctgccaacttggtcacgggtcttctacacacacctcttctgttccctcttttatgtaaccacctactgcagggaatgcaaggctgtgtgctcctctttctgctgacagcagaactcacctatcttctgcctcctaccccaacccggacatgtcttctttttatgggcaagagtgtctccagttcacttgggtttttcattatgatcttgcaaacttttgcaattagttgcaaaagttttgtcaatgcctcttccagtttgtactcacttcctttttggtatctcgctgaagtcctgttacttgtcttacacttcttccctatcttttgagaggatgtatttttgttgttgttgttgttgttttgtttgtttgttttaaattttgagatggagtctcgctctgtcaccaggctaaagtgcagtggtgcgagcttggctcactgcaacttcgcctctcgggttcaagtgattctcctgcctgagcctcccgagtagctgggacgacaggcgtgtgccaccacgcccagctaagctttatatttttagtagagacggggtttcatcatgttggctaggatggtcttgatctcttgacctcatggtccgcccacttcggcctcccaaagtgctaggattacaggcgtgagcgaccatgcccagctggagacgattgtatttttacagacatcaacaatcaagcacaatattctctcctctctggcaaagtgatccaggacagaacaccaggggcaacccacagaccttttgatcctccctgaccttgtagcttggtggttactgcagaatgactcaatgagtgggggacaccagcaattcagtagtcagagagagagagagagagagagaggaaagaaactttacctttgagaaacttaaaaattgacttggaaataatcagctttatgtttgcctaaatgtatcctttatgtcatttggaaaaagaaaatattatttggaattacctatggggaggcatcataattttttcagtaccaggtattcagggactttcacctaaaaactaaggatatttcttcatctgcttacatgatcacttatgttctgttaatactgattatttcctatatcacagacactgtaaggagggcgtttcctcatagttaaccctattttattcatgaggaaattaagatgtagcgaggttgtcaccagataccaaatgatggggctagaaccaaacccaggactgtgactcctacggttaacctttgccatgctgacagtgtgattcccagtcactgccttaggagtatgaattaatttgtcagcttttctagggttatataatataaggccttgagaaatgaaacccttaagctggcaagtttagaaaaatgggtgaaatgtttggattgccacttcaaaacggcaggtcctggttgaagtctgggcatctaagaattgtgggggtgggagcaggtgataggaatcaggagtagaaacagtaagagagggtttgtatgatacacctggtctttggtgggaatggggatcagttcttgtatgagtcagttctcacgctgctaataaagacgtaccagagactgggtaatttataaagaaaagagctttaattggcttacagtttcacatggctagggaggcctcaggaaacttataatcacggcgaaaggggaagcaaacacatccttcttcacatggtggcaggagagagaatgagagccgagcaaagggggggatgccccttataaaacccccacatctcgtgtgaactcagtatcacaagaacagtatgggggaaaccgccctcatgattcaattatctccacctgggccccccttgacacgtggggattattacaattcaagatgagattttaggtggggacatagccaagccatatcagttctcctgcaaccaccacagcctgaggaggagcactgaagaggccaaggattccactgcgcagtgagacagggtgcagcaggctttcagtacgattcaggctctggtggctgtgaggtgtgggttcttatgactctcaactcctggtatcttttgcttctggatggtgcggtaagagggactgggggttgtcgtccgtctgtctggacttcccaaaggagaagtcatggtgaggcccagggaaaggaccatctaggctatcacagggctgggtaaaagaagtcctcagtgctcactttttaaaaaagttattttaatttattactattatcattttattattatgtttgaacactcttggtgaccattattattactttactgtggtaaaatataacataaattttatcatcttggtgattttttttttttgagacagatctcactctgccacccagactggagtgcagtggtgtgatcttggctcactgcagcctcaacctctgggctcaagtgatcctcccacctcagcctcccaagtagctgggactacaggtgtgcaccaccgtgcttggctaatttttgtattttttgtagcgatagggtctcactatgttgcctaggctggcctcaaactcctggactcaagagatccttttgtctgggcctcccaaagtgttaggattataggcgtgagccaccaccacgcacgcctggccgtcgtagccatttttaagtgtgcagttcagtggttttgaatacattcataatgttgtgcaaccatcaccaccatccatctccagaaccctcttcatcttgtaaaactgaaactctgtgcccattgaacaataactcctgattccctcttgccccagcccctggcaaccattattctactttctggctctatgattttgactattctagatacctcatataagtggaatcatacagcatttctctttttgtgactggcttatttcatttagcgtaatgtctcagcaccatccatgttgtagcatgtgttggaattttttccatattaaggcttagtaagattccattgtacatttatacccactttgtttaccaatcatctgttgatggacacttcagttgcttccacattgtgaataatgctgctacaaacatgtgtgtacaaatatttctttgagaccctgctttaaattcttctgggtatataccaagaagtgggattgctggatcatatggaaattctatttttaattttttgaggaaccaccatactgttttccatagcagctgtaccattttacagtcccaccaacagtgcacaaggattctaatttcttcacatcctcgccaacatttgttttttcctatttatttatttatttgagatttgagggtcttggtatgttacccacgctggcctccaattccttggctcaagagatcctcatgcctcagcctctaaagtagctgggattacaggcacaaaccatagcacctgacatattttccatttttttggttagtagccttcctaatgggtgtgaggtgatatctcatagtattttggtttgcatttccctaagaattaatgatgttggtcattttttcatgtgcttattggtcacctatatatcttctttggagaaacatctgttcagttcgtttttgaattgggttgttttcctcagtcctcagtcttgtcacatgtatggatgtgatatcagatcagcagcatgtaagttagtcttcttggagctgaagcagcagcaggaagtggtgaggactctggctcctgggttccagctctcttgctctcccttgctcatcaggctaatatcagcatgagtgacaggaaagcctggaagactaacttcaccttctttaacaatccttttactcagggtcagcccagagtagcaggttctgggtgccacctaagacatctgatttaaggtgaagagtgatgtatttagaattggccagtgctttgacagctgcaaacataacctttaacacgcatattaaaatgaatactgagcttagttcagtctttcatttccttttaatacttgaaaagctacagttttgttttaaagttctcttaaaaggctctagcaggtgaatttattcttctgcttgattgcatttggacccttaaataacagccaccttgaaactgaaaccgggaaaaccccaggtctctggccagaagaagcaaaggtatgttctgagatttattaaataattacctacttgttgaaatgttgtaggcaggagaaaaaagctgagatgttggcaaatatgagtagagattaggaaggatcttgagtcatgaggcttttaaatgtggtggaacattttggtgttactgacctttgactcaggacagttgaaccaagcgatgtggtcttcagactcaacctggccgtggcttggtatatctttatattgactgtctcaatgaccgcagtcaactgtgatccagttgtttggagcattcacagcaatgacttgaagggaagagaataaggagtgagaaacaaaactcggaattcgttggcctttgtgacagcccgtctgcagttggtctgaatagcacatagggaaggtttcctaatgtagtacattgctctgaaactaatttgattcagagcgccagggagggaggatgttttcacttggtgataccttccatcagtgttccaaacttcagccatctgtgcttcttttgaaatttcttgtcatgctgtgtaccaaaatttacttaatactttgcaatggctccttaacttaaatatttttattttaaagagaaacttctcctactgctttgtctcctggattgcctaggttggtcaatgatattaccatctgttgggtcacccagggcagaaacatgagcattatcctagacatctcactttgctcaaagcccacaccccatgttctattaacattgtctcctggccgggtgtggtggctcacacttgtaatcccagcacttttggaggcccactccggtggatcatttgaggtcaggagttcaagaccagcctggccaacatagtgaaaccctgtctctactaaaaatacaaaaattagccgtcgtggtggcacacacctctaatcccaactactcgggaggctgaggcaggaaaatcacttgaaccctggaggcggaggttgcattgagcggagattgcaccactgcactccagcctgggcgacagagtgagggagactccgtctcaaagaaaaaaaagaaaaggctcctatgtacagtatgaatagataattatcatccaaattagggcattttggggggcaaatgggacactactaataatcatacccagggtaaactgtctgaagcaaatggggatgtatggtcaacccgtccatatggtcttgaatcctcttcccattacattctccctgctattactgccttagttcaggccttcaaaattatttgcttagactagtgtagtagcttgctacggtttccttgacttcaatcttggtcctttccaacgtatcttacacactgcacataaacatttgatctatcacccttttcagacctttcagtatctgcctgtaatgtcatgatacatttcaaatttcttagtgtggcttatgaggttcctcacagatctggttccttctagccttccaggctgtttgctcgtttatctattgctctattcacatttattgtcactgtgggtagtacaatgttaggctccaggaatataataataagatgagtttttgccctcaagatatttatagtgcagtagagaaacagtcaaggggatgctgtagcaatatgtaccatggcaaagcaccacaacctatggcttcactattcagggtgttgttcagggaccagcagcatgactatcacttgggagctctgtagaaatgcagaatctaagtcctagggcagtagctcaaatctctaatctcagctttgggaggctgaggtgggagtatcacttcaggccaagaaattgaggactgcctgggcaacacaccaagaccccatctctcaaaaaaaaaaaaaaaattagctggtgcggtggcacacatctgtagtcctagttacttgagagttaaggcagcagaatggatggcttgagcccaggagtttgaggcttcagtgagctatgattgcaccactgtgctccagcctgggcaacaaagtgagacgctgtgtctgaagaaagaaagaaatgcagaatcttagtgccccgagccagactcagtaaatgcgaatctgcattttaacaagatccctaggtgattggaatgaatgtcagcttttgaagtcctggtctatgggaccacactagttgaagcacttgattcagatccccaggagaggtcatgcctggcaagagacttagagaagaagatggagtttgctaaatgaaggcgaggagggaagaggcacatgtcctggacaaattggcatgtgctttggcacacaggcaaaagaggatgtgctgtttgggggaagttacaagttgttccatattttgggaacaaattgctgatggtggcctcacttagctcagacatgccatcaattcaaggaaaaagtttgatcaaatttgatacctccatctcatatttgagccaatcctgaaacatagtgattaagaatgagtactttgattcataaagaaaaagcagaatagaagttactaggggctggggacagggggagatggggaattattgcttaatggacaagagtttctgtttgggatggtgaaaaattcctggaaatggatagttgtacaacattgtgaataccatgaaattgtaaatactttaaaatgattaaagtggtacattttatgttatgtatattttatcataatttttttaaagaataagtactttggaatcaagacctaattttcaagacctaccatttcctttctgtcacgcctcagtcaagtcagataacgtcttggtgtctcagtacccttatctgtaaagtgggaataatgctagcacctgccttgtaggcttgtcacgaggattccttgaagcaatgcctgtaaagcacctgggaacttgttggtgatccttatgcctgcccattgaagcttgaaatgcccagccttagcagtttgcctggcacagccagagctgtgcatggcagatgctgttatagcccttccacctccctctcgactgcataccctcaactgtcttctccctgtacagcagcagttttcaactctggctgcacatgagaatcacctggagagtttttttttaaaaccctgttgcctggagcaattaaatcagaatttcaggaagtcagatggaagcattattatttcaggtgatttcagtgtgcagccaaggctgagaaacacggttctgctgtagcggtttgctaactttagtgtgcatcagaatcacctggagggtttgttaaaacacagtttctgggacctgccccagagttttccatttagtggatacaaaacaactcacctgctttattccaccatctatgtggctgctctttgcttttgtttgccatctatatcgttttaccctcttcctaataacctcttccagacccattactgaaatctttgttgaaaagatttgccaataggcatcttcatgccaatggtgtctatattctcaaacctgttccagctttagacgcagttgactatgtctcaaaattctcctcctttgaattcagagctgccactcttggagttttcctcatttctctttccttctccctcctctgcttggaactcgggactcccatgaccattctttaggtccctattttatcccttaaaaagagcacagtcttaagtgtgagaaagatgtgggtttatgtcttgtacctgggcaattcaatcaaactctgagcctcatttttctcactggtaagtcatgggtgatgataatagcacccctataaataatacatccctgacacataacactcaactgtagctattacactgtttcacctttaaaaacattgcaaaatcttgacctcagagagaattccaggggtggtgggactagcccaagggatgcaaaggggagagctgggaatacagaaaacacagcgtggaggaatgaagccaggatttaccaaaagcaaggagatagtcccaggaattttccaggagacctaggcagacagggaagtgactaatgggatcagataataggaactgaccaagagactccctatgacggcattaaaaggtgggcctgacgaacacagggagggtgttattaacggcactaggatgggctatggaatggccccagaggaaacccacaaggggatttcaaccccatcagtgtggaactcagtcactttggcaggaaacaaagtgagaaggaacctgttacagtttgcaccatctattatagtcgatgcaaaacatgactgtggggtgttacacagagctctcattacaagataaggtctctgcgtgtcatttcccgtcaatgatgttattcagcaggatggctcacatgttgaaacttgaaactccttgggtgaaaaaaaaaatccctctgcaggctataccagatgttgcttgttgtagctcctcaggcccaaaaagatgagttaatccttgaaggaaattattttgaacttgcatcaaactcagaggctttgatccaacaggccatggcaattgaaaacaaggctatcagaagagctgtgggtggtagtcctgtctctgagaaaggaacagggccactggctgacggctgcattccagaacgcctccagatgcagagggcctcacttagtgtgatgttgtgaaaatactgcactttaaacacatgtagtcataaacaaagcttcctcaccctttaaagacctcacagaagtatctctccaagacgcttctcctctcctgaatgctccaggccttgctgacctcagttaccttgaagtttctcttaccctcatcacccatggcacacagtttaacacttattattctccaaatacatagtctcctttctccagttatatggtgagttcctagacatcctaaacccataatatttgatattcctctgtctctctgaatgcctagcattctaagaggaacataacttaaaaagcgtcatgttcccctttgcatccctgaaatctagcacagcacctggcatgtaacagacactcaataagcaaataggtgcttattaaatgagtggaattgttgattgatagctaagttgagttggcatgaaaaggtagataagggaagttttagcaggcatctcttatattgtttaccaagtacctccctcctctccttccagaagtttcccttacccaatcccatctttgtagctgccacaggagttgatgcaacctgcttcagtgagttattttttgagacgttttgacttggaaccagagacaatgttaagatagtgtcttcctagggaccagatctatgtggatgtactggtaaatttaggtgctattggcgcccttgtttttcactgcacagagaaggctcatctctagctggagtgaagaatgaagctaatgaagagattaagtggaaccacagaaacaagaagaatcaaacagaaccttgctagtgttcacggcagtcacattatctcttaatacccttcccactccttttgcctaaatgaattagaattaggtctctgtcacttgtaaccacacaagtcctaactactatagaagactgtctactattattgcatggtagataataaaaaagacgggatgaataaaatctcatgataccaagcaatgaagtcttgcaaacaggaatttttcaaaacttctcatgctcatttgtggctttaataagcaccttttcaccacccctcccagagctggtgtagtaccagatatagaggaagcacacagcatacctgatgctacagtttctggtagcttgggtcttcacttttcattttcaacaacttttttccttgtgtgcatttgttgagacgttcagatgcctggggctgcaataccatctatgcataatgaaaaacattcataaagactttctaaagtacacaaagggtgatgggctttctgaacagcagccatggacttacaccaaaatatagtctccatgagcaaaggcagtgggaaagagcctttgcacagttccatggtagagaagatggttataaagactgagtggtgttcacattatctgaacctcaaactcaggcacatagcatatgagggaacttatggaaacaacgggacagcttgtctgatgttgggaaaccatcttggcatcgctggttaccatatttatagagctaatctttagcatcaagacctactctagacaggctaatttacttactgccacccaagtggcccatgttggttttatccttggcatatgccacaagttctgagtgtcaaatatttcttcctccctttatctgttttccattcacatcctacccattctccaggtccaactttcttacctcctccagaaaccactgttctgtctaatctgccacacctggcatttcgttattcattctaagaatggcaaatacatgtcatataagcacgtacccactctccacacatccgtgacagacatcactaattgatggtggtgctttttccttgtgtagctggcaaaaccctcagaattcttcccaacacagcactggaggcagccactaaaggctgattggagttctgtgaagcctagttgctgtctctgatctatctattcccttatatcgctatttaaagtttctgagcgtgcttgtcttctttctccagctgagctaagtccctgagggcagggaccatgcctcaataatcctaacaataacaatcctaacaacaataacagcagtggcaaatattcattgagtacttatatgtgctggcactgtgctggccatttaacatgtattatctaatggaatcctcaacaattcctctggagggggtattattacccccactttatagatggggagtctgggtcttagaagatgataagcaacttgtccaattatacagtcaggatgtagcagaaccagaacttgacccccaaatattttcttttatccaaagtagtgcattatcttgacctcctctgtatctgtgcatagtaggtgcttaatgcaaatttgttgaataggagctttttagaaagcaatgaagttcttcacaagagacagaaagaaattgaattgaaaataccggaagcaaattctcttccccaagaagttagaacattcttgaaaaaaggtttactaaacttttccaacatccttggctaaaggcaacaccattccccattccacaagtaaacacgctttatggatacagaaatactaaaggccaactccaatgaatgggagggatcctggtgaggaagtggcctgggagcctcctgacaggggccttgcagtgtctactaccacccagtcactggcacctccctgggcctcagtttccagacttctagaacgattcatttggacttgattagcacttcccaagtgtgttccctggaatattggccctgcaagaaattcatataaaaagcggttctgttgtcaaaagcacgattgggaaattgcctttcccttgggagagacacagtccatattaaatgctctgagaaggccagcaggaaagaagctccttatttaatgttacttaattcttatttaacccagcatttcctaaccctctttggtttcacataataacagcaaatatctctcataactaatcccatacttggtaaaacaaaacaaaacagaacagaacaaaacacacaattggctgaatagattctaaggaccttccctcacattctgtaagtttatgaaataataatataagttgactataaacttcccctcagtgaattaaaggtggagtcacaattttggatttttgagatgcatccaaaaggtttaaagcgttttaagataaggaaccaaaagtttagtagttcatgctgcctggttattttcgcaatatgaacaacagggggcaccaggggactgtagtatggccacccctccacaaactcagcaagaaagggcaaaccaaagttgtagcaaacggagggagggatttcagcaattccttttctagctgaatggaaagctactgagagcaatttgggtttctctctggctttctgttggaggaatacaatgagatagaatcaggataggttaacatctttcttttgctcattccctttatagatagaaaatcacataaagcaactcttttcaacaactgcttgtcaatggtttgtttccaccttggggcaactacattccactgtggaagttcttattgaagaaacatagcgcctatgagttgagaaatgagtggttctttccttcaccagctttctcattttaaagggggaataaattgcacatgtgaggaaaagaacaaacttctttaggacataagttctttgtaatttaaattttttctctagactttgggctcaagacttatacaataagactctttttaatgatgtggcaggctataaaaggattggaggcaattgagagagaagaggagaggagggaaggggagaggaggggaagggaggggagaggagggaagggaaagggagggaaagggaggggaagggaggggaggggagaggaggggagaggaggttattaccagcgaatactgcccctacacagagcctcccacgtatgtggatatatcacatagctttttctcacttatcatgtctttattgttctcttgtgaagtagaacaagacagacaggtctccctatccaagccaaacacaagagacttacagagccaaacacaagagacttaaggtaattgtcagcagcaaatgctcaggttggttatttttttctctgtatcttcccttattacccgccaacacagcccctacgcagagcctcccacgtaggagaagactttacatatacttttaaaatgttttcctcaagagaaagagaaaacaagatccaggaatatagcccacagaaaccagcaaaggacagaggaatcactctccacccatagcaatcaccagctcagagaaactctgagtttggagagtcttttgcattcacctaatttcatccttgcattatgtacaggagaggaccagggagtcatgcagagaggtaccagcccggccagtccgggagcttctagacaattgttccccaaagcaatgcccttcccaccgccctgtgctggaccccagtctcaagcccttaagagacttcaggtgcttatctctgcaggcagcaaagtgcaggagcaatagccacatcccatcctaattctacacactgcagtgtgcgacttgtttttgacaatcccattcttgtcccagtgagaacaatggagaaaatagcatgtaaggggatattgctagaccagcaaacaaaatgcatttgtctgtctgatttgtgatccatttctactattcacctctcaaagaaatgctgggaagagcttggaagctagcaattaagcagttcaaactctttggaaagtttctagtgccttagaattccaggaagtgctgaatcatagagtcgcagaataggaaaagatttgtaagacaagaataaaatgaatatttattgaacacctcccatattattggatatattttgtctcaacctcacagtcactctcagaggcgggtgtactgtgatctcctgttagaggaggaaactgagggtcagagtggttaattggaactggtaagctaggatttgaacttaggtctatttggactgaagaaacaactactcagaagtattatgctattactttctttgttctcacttcctctttcttactggaggatgctcagttcataacctctatctgtgaaagatacttccccctctactatcttcagattatcttcttagagatagaaacattctacaaccacatttgtatctgcctttcacaactattatagtaaacaagttcttcctagcatctaacttaaatccccccaatacactgagagccaccagctctgccctcagggaacatgaaacatggctagaacattccagttagcagcagcttcccagtcttggttccaaactgcttctgttaaaagaatcaccaattcaaaacacatgcactgtcatgaaccctcgccccaatccagatgctccactccttgggcccctttaagggtgaacatgaatatcactcaggctcaggccctgttatccagatgccatcaagagggatcaaggctttccttctatctccatttccgagctaagcctagattggacctcctttttcaaagtacattctaggactaccattttatgtgatcaaataaagggcctatttatatctgagctgtgtcagggatgagtaaacaaaattcttccactgggaatttgggcaccttctatattctatgactctttttttgttttttgaaacagagtcctgctttgtcacccagcttggagtgcagtggtgtgatcttagcttactgcaacctccgcctcccaggttcaaatgattctcatgcttcagctgcccaagtagcttggattacaggaatgtgccaacacacccagctaattgttttgtatttttagtagagatggggtttcaccatgttggccaagctggtcttgaactcctggcctcaagtgatccgcctgtctcagcctcccaataagattacaggtatgagccacactgcccagcccaccttctgtgtttctttactaacagaaaaatgtagccctttgcaaaagtgcatgcatgcagcatgatagagaatatctttcagtcttgctcctttaggggtatatctttattctttatgtatttaatagctgatttcaataatagctcatgttcaatgagtgcgtactatgtgctgggctttccatgttttaagctttacatgttttagctcattcttagcaattccaggaagtagatgctgtctttagcattttggtttttttttttttttttgggaagcagggtctcactctgtcttccaggctggagtgcagtggcgcaatcttggctcattgcaacctccatctcccaggttcaagctgctcacctcagcctcccaagtacctgggactgtaggtgtgtgccaccatgcctgcctaatttttgtgcttttttggtagagatggggtttcaccatgttggccaggctggagcattttgattttacaattgaggcaaagaagggaagcaaattgcgtaaggctgccaggtaataagtgactgaacctggccaatctaattccagaatacatgctcctgagcactctgttagttagtattcattttggctgtgatagcagaacccaaaacaacagtggtttaaattaaatggaagtttatttctcttaggtagaagtccagaggttagtccaaactagatagtccaaaactagactagaagctcaactccacacagtgctcagggctccaggctccttctctattccagtactcctaatgtgtagtttcatccccaacatccaaaatagatgctagaacttcagccatctcatcagtattccaagcagcaggatgaaagaagagacaggatagaaaagggatgaaacacatgccagttgtttactatggactgttcctggatgcagccatgtgacatttctgcttacatcccactgatcatagtagcaagagggctgggggtagttgttattctaggtggctttgtgactggttataaagtagaggattttattactgaaagaaggagaggagtaatcagaggctagatgggtatatggaggggtagagggagatgtagctggagaaaggggcagggcctgggtgatgagaacttaccaagaccctacatttccccactctaatctttgggttcattttccattccagcaggtaccaagggaaggcagggccatcccttgaaaaccatcagttttgactgctgcctgaccccctgaagctctgtaatcagcactcctagaacacaactcaggtgtccaccttggtggtaaactttaggcaggttccagcctgggaccatcagttcattgggttcaaatggaggtgggtggcttctgattggtgtctccagaaagccccaaaagggaaggtggtgtgggggaggaggacactgtgatgggccacagcctcagagtggcttttgcctctgaacctccagagcgagcctggaaaccagccacgagagagtaacttcatggtttccaaagctcctttgcatatgctatttcccttgaaacatacaagattgtgatagggcttgctctgctccctgttttgccagtgaggaaaaaggagtcagaatcctcctgtaattttcagtaggataaggtgaggtctcagaatctgtcttttcacaggggtgccaggagattcttatgtttaaaaaactttgggaaacaccaagctcagggtggcaagtgatataggagggccacatcttaggggacagataaatcacaagactgtagactctgtgatgaataaatgccctaatttatttttgttctgttttgttttgttttgcgacagtctcacactgtcgcccaggctggagtgcaatggcgtgatctcggctcactgcaacctctgcctcctgggttcgaacaattctcctgtctcagcctcccgagtagctgggattacaggcacccaccaccatgcccagctaatttttatattttttagtagagacggagtttcaccgtgttggccaggctggtctcgaactcctgacttcgtgatctgcccgcctcggcctcccaaactgctgggattacaagtgtgagccaccatgcccagccaaaatgctctaatttataaccagtcacaaagccatctagaataacagctaacccagccctcttgctactatgatcagtgggatgtaagcagaaatgccacatggctgcatccaggaacagtccacagtaaacaacagggacgtgtttcatcccttttctatcctgtccctttgagttatacctgtcgtcgtcactgctctgtctctgtacctggcacactgtagatactcaatacatatttgttgaaaggatgaataaagacaagcttagatattcagacttttagatcctacttcctctagtgccatggaagaatcctagaaggagctcacattttattatgcttgccaccgcaagatgagagataagtactactaaaactcattttacagatgttaaacactggggttaaatgacttgcccagggtcacacaaaccctaagtggtagaaccaggatttaaactcatgttcttcaacatgatgctcttttgtttctttaatatggatcaactatttattccattgcaatagatttaccatagctcaaatcattccctgggaaacagaaagtctattctatagctttttcatataacaagtaacctaatacacagatgtgagccctgtcacttgacaccgcccatgttatagaaaagttccactctgcctcacagactatttgctcgcattgaggtgccaaactggattggcggagaggagcgtatattgaacttgaatgtttactttactcgtgagcacacacatctgtttttgtttatggggatggcggcaatcagagcgagctctcctcagcagacattcttgacagtggatttctctcccagtctgagaagttttattatctctgaggctggcaagcaggctgtcagtttagaccgtgcccttttgaacccagaggcttctgggctcttctgttctttccaaagaggcattattacttcagggctgaactgaatcttaaggagatgtgagattttgtggtggagtaactacatccacgggacctcacatagacctggaagagtgaaacagttctaaaagcccctctcttatccattgacaaattcaaagtacaagagctgagcccttatctgttctactttcttaggggccctcattcctctgccctcttttgcatccattgccccagctcttgcacgtgcggcagaggggaggttgcccgcatggggaatagtttctgtttccttcctttgttgacatacctttagggaaggcataatgcacacagattgcactggcacgtgttgtctcgtaacgtgtttggtattagtagccttcaggtggtttctggctagttcttcctctgtcttagatgcagactggcccctgcactgtcttaacacagaggcaggtttggatagttggtggtgggttgcatgaggacttggctttttcactcagctactttccttgaaagaagagttaaaagcagcactttatgttccttggatacaagcaactatgactgggtttttccatctgtcctgtcaccccaagtgatgagaccagtagtcaattcattggctggcagaaggtacatcctgtggcactttatgtaagtgaagctttttcaaagagcaggatatgaaaaattagtggctatgggaggcgtgaatacagagggccttggtagtaagtgtgtccatgaagtgctgttcagtctgactttgtatttatagtctagctcaataaaaatgatgtgattttttttcttggttacaaaggaaataggatggctcataggtcaataattccatatctgatttcttagacctgtgacatttatatcacacttccaacagttaaaacttttgtcttctgaaatatctgctcattccactgggaaaagcattttggaatacacataaccttctgtgaccccagccattcgtttcccttaacctccccacaccctgcatgccatacttacttatttaatttttttttttctttgagccagagtttcactcttgttgcccaggctggagtacaacggtatgatctcggctcactgcaacctccacctcctgggttcaagcgactgtcctgcctctcagcctcccaagtagccaagattacaggcacccaccaccatgcccggctatttatttatttttgtctttttagtagacacggggtttcaccatgttggccaggctggtctcgaactcctgacctcaggtgatccacccgccttggcctcccaaagtgctgggattacaggcgtgagccaccggacccagactatttgtttaattttacaaccagcaacaagcctagcatgccacacttaagtgttcccaaattataactcttccaagtaacgggaactagaggtttcttcctgtggtgctgacagaggtgacagtgggtaagcaacaggtggttaaaggtttgagcaggaaggggccctgtacccactccagtgtctttaaggtagatataaggcatgtggaagtgtgagaaccggacactgccttcagtgctgtgggaacccaggtgaagtttcccctttataaagttttccctatgcctcccttagagggatgaggcagcagaacagagctccctgcctttacacagccatgcagggtccaggatccccaccatctaagagagacaaagaaaactgggaaagagatctgttattgagcttcctgccaattttgtcctgtgggacactcaaactggatttaatttgatatagcaaaataaagaaatactcaccatacactctatgagtgttgtgtaaaaattcttaactgttaacaatatataaaaaatcaatctcaatttgcaaggatattaatatttaaatcagaaaattttctccattagattaacacatatatgcctgggtacagtggctcacgcctgtaatcccagcactttgggaggccgaggcaggccgatcatttaaggtcaggagttcgagatcagcctggccaacatggcgaaatcctgtctctactaaaaatacaaaaattagatggaggttgcagtgagccgagatcttgccactgcactccagccccagcaacagagtgagacttcatctcaaaaaaaaaaaaatatatatatatatatataatatttcagtctcaggggcaacaaagatatttttaaaagctcacagccaatgatggtgagtgagggtatggagaaatggtcatgcttacacactttcattagatacataaattggtacaatccttctggcacataatttgataaataataacagccttaaatttcgacctagtaattctttttccaccagtctattatttagtggaagttgttattattatgaaataatcagaaacttggataaaaatttataaacaaagctgtttatgggagcattatttatagttctaataaatgtgatgttaaaagtatgatttgaataatgaaaaatggttaaataaatgatggcacatccataaaatttaatattgaggtagacgttaaggtccttcaaaactattatggcttcctcccagattaagttagaaataaacacatgtataagccagctcttgccgcataacaaaccaccccaaaattcagtggcttaagacactgtcaaaattcatggactggctggatgaatcttttggtctgagctggctcagctggaactggttgcatgtatgggacagctgggatggctcatcctctctctccatgtggtctttcatcccctaggtcaatcttaggctattctaaaagcatgaagagagaaaagccccaatgcacaagcatgtgtcaagcttctgcgcatgttacatttgctaatgtcccatcagccaaagtaagtcacatggccaagcccagagtcaacaagtggagaaatagactcaatctcttgattggaggatccgcaaaatattgtagccattatacacacacacacacacacacacacacacacacacacacacacattggctgggctgacgcctgtaatcccagcacttggcagatcacttgaggccaggagtttgagagcagcctggccaacatggtgaaaccctgtctctactaaaaatacaaaaattagctgggtgtgtgtgcatgcctgtgatcccagctacttgggaggctgaggcatgagaattattttaacctgggaagtgaaggttgcagtgagccaagattgcaccactgcactctagcctgggcgacagagaaagactctgtatcaaaaaaaaaagaaaaaaattaaaattaaatatatatatttatttcacaccatgtaacttgctttggctaataaaatatgtatacttttctatattctcctttcctcttgctcgatgatcagatacatttgaaatagcagctgctcagtcgggctctgtttcaaagtgatcaaaatgctgtcctgcaccagacatgaggcttgaatcagaaacaaacctttgctgtattaagtcacatagagaatttttgttattgctacataacctactttgtctaaagtaatacaaaaattatggagggactgaaatgatgtttttagaaaataattatgtgagaaagaattcaataataaaactctttgtaaatgagcagcctatgaagcagatgcatacttgtatatgttgtataatcccaaatttgcatttgtatttgcaaacacatacacacatatatactgaaaggaaatatatcaaaattttaacagtgggttacaggtaattattacttttttcttctccgtattttctgaatttttgataatgagtttgtattatcatgggtaaatgatatatatattttttcaatttctccctagcccgtccctataagagtattactcagctgagcgtggtggcttacgcctgtaatcccagcagtttggaaggccgaggcaggtagatcacttgaggtcaggagttcgagaccagcctggccaacatggtaaaaccccatctctactaaaagtacaaaaattagccaggcatgatggtgcatgcccgtaatcccagctactcaagaggctgagacaggagaattgcttgaacccgggaggcagcaattgcactgagctgagattgcgccactgcactccagcctgggtgacagagtgagactctgtctcaagaaaaaaaaaaaagagtattactcatccctgtccatcagcaggtggtttactatccttcttgtgggggaattttatgtctccatctcactggacttgggcttggccacgtgacacactttggccaatgaaatgtgagtaaatatggtgtctgctatgttgggtgtttaagatgcattgtgagttttggccagttttcttgctctttcccaggtacgtctcatgaaggagttactctcttagcctggttcctggaatgagacagaaatacagagagcgagaaaaaaatgtttgttctgagttgttgagatttggaggggttttgttaacacagctaacctcactaagaaaatgtattttttactttaaaaaacacacctaagaatatgaccatcagtgactcataagccaccaaattctaagtcctgtctgtaaaggacactgcttccttctttatcccacaccattttctctctctctccctttcaacttcaaggtggtatactacaaaatcaggttgtcctgaaataaaccagttcacagatacaaggtctactctcgtcctcttgtaaagtagtaggtcacattcccgttttctggagatgtaccaggagctgtcacttctttggacctcaggacaggttaaaaaaaaaaaaggagctcatctctttttctactgaatattacagagcaggggtgtccaatcttttgtcttccctgggtcacattggaagaagaagaattggtggtcttgggccaccaatttttttatgtgtagtcttgggccacacataaaatatactaacactaacgatagctgatgagctaaaaaaaaaaaaaatctcataatgttttaggaaagtttacaaatttgtgttgggccgcattcaaagccatcctgggccgcatgcagcccatgggccgcgggttggacaggcttattctagagaatattttaacactggcagggagtatggcatcattcagaagtcattaaccagcatagaacccttattctgaattaaagtggacttgtttctttcaaaacctcgccagggatttcttaaaatgtacagaagattgatcatttatacacaaaatgctcatttattcaaagaaaatgaaacttcttatctttctacaaattacctaatcctcctataagctccaccctgctgagtaacaaggaaacttagatttaagtatttcagtgtcccctctgtcttctgctccaagtggcttgttagggtttgctgattgtgtcgctgtggtggtgggtgggtggaactccaatctttgtgttggtctcatgccagatcttcacccgttttgaagaaatgatttccctgtctaccctgtcactcctcactctaccggcaccttctgcaaacatctgtggctacagtaatactcttggtctgctgtctctcagctcagccagggtttgggggcctcctggttaacttgcatcatctcagctctctgagattgtgtatttctttaaaggtgtggggattcccattcgatcaccagcccaggtggtctgcccgcaagctcccactttggtaaccctctgctgagcttgccagcacaccatctactttctttatctttcaatgggcccttgaaggacttcagggcactcttcacaccacatgagagccaaggacagctgggcttagcagcccagattggtagagggtgcactctgttttgttccaattgctgcccttatacaggagaagaattttctgccttgctggaaagatgtgagctagacttcctgtccttggctttgggtgaaggtcacagaaggaagttgggccctattatcccagtggttgcagtgaggtctctgcaggctcttcagatctgaatgagattctcttctgcttctctgagagtcattctctagtcatgtttgggagcataattcccatctgcttatcatttccccggcatagaacataggaggtcaggatcgcacaacattcccttgttgttctcaggatgcctctgaactccgatccttgaatgttttgctccaattcatgctgaatttcttgaatggcccccagcacaccggtgccatgttacttcctacttctgagccttggcccatgctgttttctctgcccagactgcccttccaacatccactgctcttggaaaacttctgctcatcccctaagacactgcgcaggactctttctctgagatgttcacttcactctgggcactttgcatgatgaacttcatcaaaaaaccttctgtgtctgtcttcatcatgagaatgaaggtcctaaggggccagggtttcatctaaaacatttttgttttcctaatgtctggtacagaaaaatgctcaacaaatgttggtttgcaaaaataaaccttgggctagtcgcggtggctcaagtctgtaatcccagcactttgggaagccaagatgggcagatcacgaggtcaggagatcaagaccatcctggctaatacggtgaaaccctgtctgtactgaaaatacaaaaaattagctgagcgtggtggcatgcacctgtggtcccagctactcaggagactgaggcaggagaatcgcctgaacccgggaggcagaggttgcactgagctgagatcatgccactgcaccccagcctgggcaacagagcgagactctgtctcaaaaaataaatgaataaataaataaataaataaataaaataaatcttgggtaaagtatgcatgggatctcactgtattacttcttacaactgcaaatgaatttacagtgatgtgacaataaaaagtttaataataattttttttaaatccctaaatgaacagagcccatcatttttgaaagctccctggttaccccctggtagaagaccagagtccaaagtaagtctgaggccttgaagaagatgccattttcaagtgaagggtggatgcttcaaattattaatagttggatcccccacttgccctcagaaccatcaagttcagaaagctttgaaggaagttggagcacctgttagcacatacaaattacagcaattataaaaaggaaagcctctgggcagatgaattagaaaaaaatgggcttctctaggcttggtgggtggtagtgtctttgtgtgaaataaaagcatggtattccttccactggatgcttcagccacacaagctaagagaggagtcaattgcagcctctttcttcccctcagtccgtctctgttgtgtaaggcataacctgaacgcagcagcccaggcctgagtattttcctaggtttgccatctcatttcaaagggccaactaccatgttttcatccccactggagtgtctgctcatgtggaaacattatctttggtttgtagcaaaaacttagtattttctgttaaatttcttaaatgggtcagtgtaaataaagagttaaggtcgtgcacagtggctcacgcctgtaatcccagcactttgggaggccgaggcaggcagatcacttgaggtcaggagtttgagaccagcctgcccaatatggcaaaaccccatctctactaaaaatacgaaaattagccaggcgtgggggcacgtgcctgtaatcctagctacttgggaggctgaggcaggagaattgcttgaacccaggaggcagaggttgcagtgagccaagatcgcgccactgcactccagcctggacaatagagcgagactccatctcaaaaaaaaaaaaaaaaaaaagagttagtatacttgagttagtggtccattctccatcaaaattggttcccttttagtgaagatcccctctgtcttagtccattcaagctctaatgatagtataccataagctgggtggcttagaaacagcataaacttatttcctacagttctagaggctgggaagttcaagagcaagtctggcagatttggtgtctagtgaaagcctacttcctgattcacaagtggtgccttctgctgtaattcacatgttggaaaggacaagggaactctttcagttctcttttatgaaggcactaatcccatccctgtgacttcatcgcctcccagaggccccaccaccatcaccttgggggttaggatttcaatatatgaattcaggggggacataaacattcagaccatagcgtcctcctttggagtttcttcctagtggaagttcttgttaggataaagttttctgtagcggatcttttgtttgcttgtttgttttaatacctggagagtgaaagtgaggatccaggaaccaattctggtctctttatgtttctcaaaggagtggtcctacaggactttgctaagcaggcagaaatatgcatcttagttaagattacaatcactgcacatagtatatttgttgcatggagtgagggtggagtaacagcttgttaaagtcattttttaaattaagaaatgtctataaatgtatttgcatctattattgtctttgatttcttttccacaagactatgaattctttatgcatgaggaccttgagttcacacttgtatggctaatctgctggggtctgatgttgtcctgccaaggtggcacagatacacacctgacaagtgacatgtagcagagagtgaaatatggcttactggggatgcttcgatgtggagtggcagcagaatgcatagtaccctggctgtaatcattgacaaaaactgtgtgcttgatcagccagagctggatgctagcttcccgggagtggctcctgggaaaggaccctgccccttactgctctatgtattttggggaaatgatggcagaggacatctagcacactgcagatattgggaacttcttggttgaagaagcagccttgttagaagagagaccttttagaatttagcctcaggcatcagcctgcttttcctttgaactaacacagacctgctcagccagcttcttgctaaactaccaggaaggctgctgggatttatctgtcctctagcactgagtaggtaattgggaactcagtaagtgttgaatgaatggaactattattgttaggaggaaattcatatttatttcatttaaatttgctctcctcttgcaatctggctatgggaaggtcccttaggaatggatgggctaggcagggccagggggattttctctgcctgcccatttcatagagaagggagggggcagattagctaccatgaggttttttgtttgtttgtttgtttatttgttttctgaacctggatcctaagaataaaaaccaagagagcttctctgtcctgctgagtagaagaggtagccactggagagaccttggtacagaggaaccagagaaggcatagctatatgccccaaatcacagtttgggcagagtagcccaaggagagtacacagattgggcagagtagcccatcgtaccccactgtgcgaaggagaacctagagaccattcttgggaggactctgggaaggtatgacggtcatgttgtttcagcccaaacctcagggcagccacgtggcagctgttaagtgctcttttggaggtaaatgtgtgaaaccaggactgttccaagggcaaagaaagtccaggattcatcattaagatgggtttcctgtggtccctgaaggcctcagcatcacaggagattccagatctgctgctctggggatccacatgaggcgggatgatgtgcctgctgaaattaaagggacagggtggtgggaaaagtctccatcccaggatggcaggcttccacagccacagcaactcatgacaggcctcactgggggatgagcagagctgcgtcctttggagccagagacatcaggtctcaggtagtgtgaaggatcctagccatggagtggccagccagtaaactgtgttgggcagcagaggagtaagaagctgcatgtccttccatgggcaagaagaggcactgcaagagaaggcagaaaatgtgtttctgggcattgggcaagcctttttttatctctccctcaaatggaacagaatcccagggtaggatggatctgtgacctcatggtaacaggtggacctaataacttgaaataccaaggataaggaaagagcctgttctactgaaggttcatatggcccagtggtccccaagcattttggcgcccagggcccagtttcatggaagacaatttttccatggaccaatgtggggggaggggtgatttcaggatgattcaagcacgttatatttattgtgcactttatttccattattattacattgcaatatataatgaaataattatacaacttaccataatgtagaatcagttggagccctgagcttgttttcctacaactagatggtcacctctggggctgatgggagacagtgacagatcatcaagcattagattctcataaggagttcgcaacctagaaccctcacacgtacagtttgcaatagggtttgcggtcctatgagaatgtaatgctgctgctagtctgacaggaggcagagctcaggcggtaatgtgagtgatggagagtggctacaaacacagatgaagcctctgtcactcacctgccactcaccttctgctgtgtggcacagttcctaacaggccacggaccagtactggtccgtgacctggggcttggggaccccagatatggcccatctcatactattactattactagtgctactactattactggctaacgaggcactttgctaaaagctgtacaagcatttttccacttaatcctagaaataaccttatgaagtaagtaccgcaatttaggaatctgaagctgagcaaggctgcaaaattgttcaaaataaaatagcttggagtggtctagcctggaacagaacacagttacattggactccagagtccacaagcctcagcattactctgtgtgcgtctcaaatgtcttaagtaattgatgcggccaagatagcttccctctgtgagtgccatgtggcaggaattgtgtttattctcttcaccactgtggtcccaatgccgagtacggtgctttgttcccaataggtattagatatgtatttgtggaataaaaacagggatgtgtgtgtagcagaaaaccatcagtttatactgagcttctttcctgaagacagttatgaatcatattcccataccaggtcaagggatggaaaacgtgatcatcaggctgtttgtgcttttaacatttcagattcaaaacaagcattgttttatgatgaaaatgaattatcctgacattctatcacatcttatcagactcttttttattcaaaatgctgttggtactcttacttaataaactggagcaagcaataaattccactggtctacagagactgtggttgggttcccagtaccaaaatgattttgattattgagttggcatatacctctaaacattcctaaatcagtggttggcagcagcaatattctgaaagaaagagaaaaagaaaaaacagcgcgtgcgcatgcatacacatacacacacgcgcacacacacacgtgatagcttcaaagcctcttacacattaatggattccttatggattacatggctgtaattgtgaaagagcacaaagaactaaagggaaccttatttctttaaacaaaaacattttttaaaagatgttccttttgaaaagtcatttgttttttctgaagagagtaggaaaaaaaaagctccaacataatggaactcttaaaaatgtgtcaggaacacaatagaaaaccagaataaatgtaggcaaggcaaccacaggaagccagtcgcagactgagttcatttgtactctaacagcagacatggatgaagaaaacaaccagcaggagagagagtagtgagaagtgccagctcatagtaagggggccagtaggaagggagacggtgtgtggtagggggagggacattctagaattcaaaacaacagactattcatatcatattcttaaaatcggtgtaatgaaacctgtttatattatcctcaaattaattgttcaatgttcgaatgtcagtgtcccagccaatgacccaccaacaatttccttggtcattgcattttctttccttggtctttcgaaaaaataacgaatgagtttctctatttataaagtttctctgaaatgtcttcttatgtcatggaggctgggagttcatcttgggacactggatgtgatggggggcccttggctgggatcaggaggtttttgtgattgtgaggcaacttctgatcccattagctgacggttgactgacattttggaacaagattttgcaagatacgggaaaggaaaaaaaggagcatgggaaggaggcacttaaaagattgagaaggcaggaataagctgagtgctcccagatttgaggaggattttattgttggacacagatctctggtgagcttgcagccaggatgtcggaggcctggtatgggggacctagtttgggttttcttgtcagctttgtactgaccttaccaagcaaactggctctatgagaaatgggagccagttaatttaccttcccatttataagttaggtagcaatgtatacacacatgagggggcagcctttcctggagggtttaaggtaatatttgagagaaaataaaaggaaataccactttagatgcctggaaattgcttcccagagaagtggcataggctgaaagtaaccatgaaaagttccatgaaagatttatctagattctttgttactagatttgcaaatacttttcttagtgggagtgaaatgctttagggaatgtttttaagttttccttaatattcatgtcagaagcagaatattggttgggttgcataggatctgactgattatgtaatttctcactgaaaatatttattacactctggaagatttcaggaaggccctctatccaaagtgtgtggaaaggtagaaaaaaggaatgggctttgcagtcagacagccaggggtttgaagcctacttgcactacctgctagctgtaagatcttggggaaaccacttcacctctttgaatctcagctcaatgctaaggacaaaaatatatgcctaacaaggttttcgtgaagagcaagagagatcatgtgtgtgaaaatgtagcataggacctggcacatagtagtagtactagtaggattaggttggtgcaaaggtaactgtggtttttgccatttgaaagtaatgataggtcaggcctggtggctcatgcctgtaatcccagcactttgggaggccgaggcaggtggatcacataaggtcaggagttcaagaccagcctggccaacatggtgaaaccctgtctttactaaaaatacaaaaatttgctgggctcagtggcaggtgcttgtaatctctgctactcgggagccagaggcaggagaatcacttgaacccaggaggtcgaggttgcggtgagccaagattgtaccactgcactctagcttgggctacagagtgagactctgtctcaaaaaaaaaaaaaaagattaaaaaaaaaagtaacggcaaaaactacaattacttttgcaccaacctacttgctgtccaataaatgttagctccactcattttctcccttatataaataagtaacatactagccctaagcacttaccatacatataacttcatttatcctcaaaacaattctatgagagaggtaccattattgacccaattttacaaatcttagtgagtttaaatactgtttaagatggaaattatctattctgcataacaacccccagaacatagtggcttgaaacaaccaccattttaatgtatctcatgattctgtgagttgactgggctcggctgggtggttcttctgccccacatgctgttgtctggggctgcatttatctgaaggctcaactgggctggaacatgcaagatggctcccttgtatggctggcagttgatgctggttttcagctgggagcacagctgtgaccgtccataagggcacaaacccatgcttctccatgtacctctcataggatggcagctgtgttccaaaagggggcattccaagagagaagacatgtaagcttctagttctcttaacgcttgggctcagaaatctcagaatgtcacttctgccactatctagtgatcaaagcagtcacaggcccaccaagatttaagagaaggggatagaaattttacctttcagtggagaagtggtgtgaatatataggagggaaggagttgatgacagccatgattggagactatctaccacaaatgctttgccaaaatcacagaacaagtcaggtgtcagagttaagattcaaaccacacaaatcaaacttcagaatacatattctcagccactaggccatacacatacacaagacaatatacaattacatgcccatatgtatggaaaacacaacaagtaaaatataatttcagagaaaagatcagaacaaaattaagagctctaaaagccagaaactaaaaaacatacactttttgtgtgctttctccccatataatgcagaataaatgttacttcttgaacacatacttattcaccctattgagtaacccatgcttgtatggaagatgtcagagagacctataattgttaaagaaagcttccagggagaagcagaatttagcctgactctgaagtctgattaggatttgaataagacagagagacaaagaaaggggaggaagataaaatatgaacaagaatgagcaggaagtagtagctaggggatggaagaaggacaaggctgaagtgatttggaaacagtaggactgattaataactcaattggtttcccatctttttttttttttttttttttgagacggcgtctcactctgtcactcaggctggagtatagtgactcgatctcggctcactgcaacctctgcctccttggctcaagcaattctcttatctcctacttctgcctcccgagtagctgggaccacagatgcatgccactgcacccagctgttttttgtattttttgtagagacggtgtttcaccatgtttcccagattggtctcaaactcctgagctcaagtgatccacccacctgggcctcccaaagttttgggattacaagtgtgagccatggcaccccgctggttccccatctttataaatatcccattgtagcactgggaacctgattacaaagaatgaagatcctcatgacaccagcccatctatgcaaactctgtttcaagacttggccttgctgaaggtggatgttggagagccttttcaggggctgggtggggaggatgctgcttgaagttcaccctgatggcaggtctaggaagggccaggttcacaccactgtctttctagtttaatttggaaatggattgctaagcatatgacaaacccagtcattataactcttattgtagaatgctctagagagttcattaacctaaatctctcttatattaccactctaccagtactgcctgatgaaggcaaggacttgagccattctgagcaaacaccatcttcagaatattttcccatgaaggtggcttctatcattctcatttgaaaaatctttgctctttcttcacatttgaaagaaacccagtatgactgttgtaatttttttcacgtaaattacaaatatttagaatccttgtcaaagcagtgaaaaaaaagcagatgttttcctttatgttggccccaagtaataccacattagaaaatagagagtattttcaagagttgttaaaagatatttcaagaaaataaacatttgttgaatgcaaacaagaacagagtatggcatttaaaaatactaatttagagctaaggagtctgaggctcagagatgatgagtgatgtgtataaggtcacagagtgagtttttgcagccatgtcagaatctgacctcagttctctcaagtcccagtctggtgtactttttgtactccagaatgcactactccagataaatgcaaagatggccatccccatatcctttgggcctccccatatccacgtcctttgcaatatgactttgcaattcctttcatctcaaggtagactatttccccacttcttgaatctgggatggccttgtgatttgctttggccagtgaaatgtggtagaaatgatggtacacttctgagcacaggcaccaagagacctgtgagcttctgcttgcagtaaacttactaccactgtatggtcaagtctaggtgtcttagtctgttcctcctgctatggaaaatggctgacactggataagttataaataatagaaacttatttctcacagttctgggggttgggaagtctaagaccaaggtgccagctggtttggtgcctggtgatggcccagtctctgcttccaggatggtgccttgaacactgcttcctccaaatgggatgaatgctgtgtccctacatggtgaaatagagacacagaggggaaaagggacaaacagctcccttgcacttcttttataaggtaattaatcccattcatgagggctctgcctttatgacttaatcacctcctaaaggctccacctcttaatattatcacagtggtgattaagtttcaacatatgggttgttggaggacacattcaggacatagcactaggctatacttagaagataaaaagtcatggagaagatcccagtgattccagtcaaagccatactaagctatccaacaaccagtcaaccaccacagatgagagagcttaccccacattgccagagcttacagctgatcatgagtgaggcttgagtgagcacagctgagaccagaaaaactgcccagctgactcatgagcagtcacaaatactcattgttttaagcagaattcagcaaacctttacttttaaaggaccctatagtacataatataggttcgtgcagcataccctgtgttgtaactctcctctgctactgtagtgcaaaaaaatagccatagatcatgtgtaaatgaacagacatggtggtgtctaaataaactgtgttcacaaaaactggcatctggaccacaggctatggttttctgacccctgattttaaggcgttgagttttgggtgatttgttatacaacaagaactaactgatacactacatgattctgaattgatatcccaaataaagaaaaacatcaaagttaataccaagcaatgtatttgcaaagataaaaggaagtagcaagaggaaaatatctccatttgcttgaagtttacaccttagctgcctttaaagtttacaccttagctgcctttacaacactttgtttgcagactgggtatattgtcatagaactgctatttcagtctttacaaataagattttaatgaggctagccacacttctagtggaaaaaaacttattttggttgcaaattcagtttgcaagcttctgaattcagatttcaaccccattgaaacagatttcaaagatttctggagagcttttaaagccaaattcatcagcctttgcttagttctcctcatcctcactgtctccatcatagttagtgcttctgacctcagcctccttgaaattctcttctcctttggcttgcatactgcttctagttcatttctttcctctctggtctacagtaggagctccatattcaaagctgctcccctccttacacatgtcagtcctgagccactttttctagtgggtcttggtcaggcatatgtgtcagaagcctctatgtaatttatttaaaacttggaagcataattgctataatttgcaaaagctcctcaggtgactttggtgaacacttctatgacagacagtattttacaaatatggctccaaaatatctcctatcccacatgtccttctgcaatgtgtgccactcccacatcaagagaatcaagagagagataaagtctaggctggccaggctgcctttgctctgcaccacgtgttcactgtggtgggccccatgccagggcagtggctgcagcagctggcagtgctagtcctgattctggtgctagcctggggggctggtctactatggcaggagaaggatcagcccatctatttggcagtgaagggagtggggcttgatgtcacctctggaaaggggttttatggacaaagagccccctacaatgccttgaccaggaaggactctgctagaggggtagccaaggtgtccttggatcatgtagaccttacctgtgacacaccacaggtctcatagccaagaagttgtagtccatggatgatgtcttcaccagtgtgtacaaagccaaacacccaattgtcagctacagggctcagacaattctcaatgagtttggcagccccaacctggacttcaaggctgaagaccagcccctttttgacaagaaggaggggttctgaggtttcatctgcaggagcaggttcttgggagagtgaggtaggaagacattccagcactaaatttcctgcaaaacaggctgcctaaagcttctgacttacccaggtttgaataaaacagatgcttaacctggaaaaaaaaaaaaaagagataaagtctatttatcaacctcttgaatatagtggggccctgtgatatctttggccaatagaatgtgatagcagtaattgtgctagttctagacatagccctttattggtctggtagctttcacctcctacctcttgtaagaagtgtgattatcttgagacaaccatggtatgagaaagctaggccatgtgaagcagctgcaaaggatgagatcccatgtgtgagtggagaatccatctgggaagtggatccttcaggcccagccaatatcatgtggaacaaaactacctagctataccctttccaaatgcctgacccacaaaatcataaacaaaataaatggttgtgttatgtcattaagctctagggtagtttgttactcaacaataggtgaactagaccaaccctctttacctatacacacataccatcctgttaagaatcactgatgaagctggccaggtgcagtggctcaggcctataatcccagcactttgggaggctgaggagggcagatcacctgaggtcaggagttcgagaccaccctggtcaacatggtgaaaccccatctctactaaaaatacaaatttagctaggcgtggtggcatgtgcctgtaatcccagctactctggaggttgatgcaggagaatctcttgaacctgggaggcagaggttgcagtgagccaagattgtgccactgcactccagcctgggcaacagagcaagactccatctaaaaaaaaaaaaatagaaccactgaagaacctatattgtctccctggccttaaccctgttaagaaccagtaacatcctatactgctgcccacctggcctatatggattaagccaccctccatgagctgatacttcagaaatcttaatcttaactcttttctgagctctacaccagttagttatgtagacgtcctgctggtacctcaaatgcaatacatttgttgctaaactgaacgcatcagctccctttttaaaagtcctgtgcccttttgcaattaattgtaccattgtttaccaagtcacccgtggaataattttttattcctctctttcacctggagcagccattaagtcacaacattctttttgtcttcttctttctatcctttttgtcattaacctaataataactttatcatctctcagctgcattaccgcaatggtctctctgccttttattctttagtccatcttccacaaaatggccagagtgagctttctaaaacatgagtaggttcacattatttctctccttcaaaagcagcaatagttcctgaatgctcaccaggaaaatctcactcttagtatagcaggcaatgtccgccactattgagtggcaaagtaacttctctacctgtcatccattacctccttatcacaacataactctcagctacctggtctactagctgcctttccctgactctgagcttctgtacagactttttcctcagtatggaatgactctgcactctttctccacatgtagaatttttttgagtatctcaaagcccagttcaattttcatgttttcctggatgtgttttctgattgctcttttccctagggctgccacatatacctgtgcagtgtgtaccacacaactctaaggagagccattcataattacaatgtaagttgcacttcctagagttgtacaatgtacaacttataacaagctccagtcataagtaattattttgttctctgtactccttcaatacagttctttattttgttccctaagcatacgtttataacactgactatatgccaggcactgataaaagatcacagacacaaatatgaatattattaggtcttggcctcaagaaggttaaagttagagcagatagacatataatctgtatgttacatatatacatacacatgtatgttacatatatacacacatataatgtatattacaaaaatctttcacctttattttgtccttactttcatcttctctatatcagtattggttgagagctctattttagtgcaaaattcttaaaggcagaagtaatgttttatttatcatagcccacaactaacactagaatgtgcaccatacagggctgagataatggttattggatttagtcagatgtacaaatagtaacaagagtaatcatttgttgactttttacatagaacattgtgaactctgacatgctgggtgagaagtacacatttagagctgtggcagaggctgctgtatgttcacctaaccccattcgattttcttactggccattcagctagactatatttcccagccttccttgctgttaggtgtgatcatgtaactaagttctggccaatggaatgtggacaggaagtgattatatatataaatatataatatataatatatataatgtaatacatattatatattatgacatatattatacattatatatatatatatatatatatatctggcctataaaaaccttctgcttaatctatatttttttctacatccgatagcttaatggagaggaccctgaagatctataagaggtagaattacaagacagaaggagcctaggcccctgagttgctattagggggattaatagctgactgagaacacctgcatgatactaatgcatgagttagaaataaacttttattgtgtacagtctctgaatttgggactgcttgttacaaatgttagcttatcttgactaatctaagtactaagtttaatataaccttcctagattgatcataattacctacttttcaaaaaagtaccccataaaaaagattccaaaactgtatttattaatccatttaagtataaactctctcatttctgtgattagaaataatagctttgttcaatcgcttacatttatagtcttcaaaatatgtgagtggtaataataccccaaaaatatcaatttctcttaagagatactttaatgaacctagagaaaactattaggcatagggtatgaaaagatctcagggatccccgtcactggtaaggacagtgctcgagccttccacagcaggctgctgtttacagaggctgtcataagatggggatactgaggttcaggcctgctgaatgttgcaaaagagggaccaagctttgagttccttgatgccttagaagcagtatggcacttgtcactactctgtgatttgtatttatgtcacaaccttaccacttcctgttttcatccccaaaaagagcttttgggagaaaaacaagaccacaaagtgtagaaggccgactgtgcccctttcttcttgtactttctcaacgtacattcactaggcacccactacgtatacttctctgtgtgtgcatggtgtgtgtggtggaatagttcaaataaacatgataagcagagctgcttccagggaagtttttaggctgttgagatttgacaatgcaaacagctgtttaaaacacagtacggtgtagaaaggacattgactttcgtgagacagacctgggttcaaattctggctccattaatgactatggtttaaacatgggcacctacttaagcacttaaattcagttttcctaactgcaatttttcaggatggttataagaattagaaaattttccagcatggtgcctggaaaatagtggctgcttaattagtgatagctattcttatatagggagacagcacacacatatgcacacatgcatgcacacacacacgatcagttaaatatatgagaaatggcaatagacaagtctggaggaggggaataacattgggctgatatagatgaaaaaagaacaaggcttccttttagaacatttatcatttctaatataataaggaagccagatctaaatgggcgactctcctgcaggtatcaccaacaaagaataaaaggagaaaggaattcactgtttcagaagaaacatttttatatcatatgaaaaaattttgagcaggcactgttgactcatacagacacatttgtgtgtgtgtatgcatgtgtgtgtgtgtatgaaggatagatcataaaaattgttcatatgttcgggaacaaaattaggacatattttctaaaattgtagagatccagagttagaagaggatctttcaacccaaataaatcatttcacaatcaaagtgacagactcaaagaggtgaaatgacttgtctaaggcaaacaactaggaaatagttgagccaggacttgaatcttgatctggatttccagtccaatgctttctagtcaagaaaggagttattccatgatgccactgaatagacctttttggagggtcttagttccattttataggtgataaaaatgaggccaacagaatgataatgatggttaccatctatcaaccacctaccttgtgccaggcactgttccaagcactctctttgataatcttcaccacaaccctatgagattggaaatgaggcacaggaagctaagtgactcacataagtagtaagcagtagagcaagaattgacaccaaggctgtctggcaccaatgcacatgatcttaaccactactttatactaacagattggattcctgctcttaatctttttgataaaatatgatgcacattggctgggcacagtggctcatgcctgtaatcccagcacttcgggaggccaaggtagatggatcacttgatgtcaggagttggagaccagcctggccaacatgatgaaaccccatctctactaaaaatacaaaaattaaccgggcgtgttggcacatgcttgtaattccagctacttgggaggctgaggcaggagaatagcttgaactcaggaggcagaggtttcagtgagctgagatcgtgccactgcaccccagcctgggtgacagagtgaaactctgtctcaaaaaaaaaaaaaaaaaatagatgatgcacattatgtcaaaactctgctggtaagaagcataaattactttgtctacaggcacatctgctgagagtacaagtattattttatagataagaacatttgcttgagtgcttaccatgtgtcagagttctgcacctgtacatatgatctcaggtaaagcatgcagcataatgctggcccacaaaagatcaatgaaacaaaagttggtcatttgaaaagataaagttgacaaaccttcagtcagactaagaaaaaaagggaaaagacccaaataaacaaaatcagcgatgaaaaatagacattataactgataccacagaaattcaaaggatcattagagactattatgagcaactatatgccaataaattggaaaacctagaataagtgaataaatccctggatacatacaacctaccaatattgaaccatgaagaaatggaagacctgaaaaaagcaataacatgtaatgagataaaagcagtaataaaaattatcctatcaaagaaatgcccaggacctcatggtttcactgctgaattccatcaaacattttaagaactaatactaatcctactcaaactattccaaaaaattaaggatgaaggaatacttccaaactcgttctacaaggccagtattgccctgataccaaaaccaaacaaagacacaacaaaagagagaaaaactacaggtcaatatctctgataaacatagaggcaaaaatcctcaacagaatattagaaaactaatttcaacaacacatttaaaagatcattcatcatgatcaagtgggattcatcccaggaatccaagggtggttcaacatatacaaatcagttaatgtgatacatcatatcaacagaataaaggacaaaaaccagataatcatttcaattgatgccaaaaacacattcaataaaatccaacatctctttatgataaaaactctgtcaaaaaatagaaagagcatacctcaacatgataaaagacatatgcaaaaaaccgatagctagtatcatactgaatgggcaaaagctgaaaaagcctttcctctacgatctagaacaagacaaggatacccacttttaccactgttattcaacatagtactggaagtcctagtgggagcaattagacaaaataaagaaataaaggacatttaaattgaaaaggaaaaagttaaattatcattgtttgcagatgacataatcttagatttagaaaaacctaaagactccactaaataaatctattagaaatgataaacagtttcagtgaagttgcaggatacaaaatcaacatacaaaaatcagtagcatttcaatatgccaaaaggtaacaatctgaacaagaaacaaagaaagtaatctcatttacaatagctacaaataaagtaaaatacctagtattaggcctggggcagtggctcatgcctgtaatcccatactctggaaggctgaggcaggcagatcacctgaggtcaggagttcaaggccaacctggccaacatggtgaaaccccatctctactaaaaagtataaaaattagttgggcatggtggtgtgtgcctgtagtccctgtagtctcagctagggagactaaggcaggagagtcacttgaacttgggaggtggatgttgcagtgagccaagatcacaccactgcactccagcctggacaacagagagagactccatctcaaacaacagcagcaacaacaacaacaacaacaacagaacaaaaccaaaaaactagtattaaatacctagtagtaaaatatctttttaatcaaacaagttaaaaatctctacaataaaaacaataaaatattgacaaaagaaattgaagaggacacagacaaatggaaaagatattccatgttcatgatttggaagaatcaatattgttaaaatgtccatactacccaaagcaatctatagattcaatgcaatccctatcaaaataccaaggacatacatcacagaaacaacaacaaaaaaatcctaaaatttatatggaacaacaaaagacccagaatagccaaagccatcctgagcaaaaagaagaaaattggaggaatcacattacctgactgtaaattataatacaaagctatagtaaccaaaagagtgtggtattggcataaaaacagacaaatagaccaatggagctgaatagagaacacagaaagaaatccatacatctacagtgaactcatttgcaatgaaagtgtcaagaacatacactggggaaagtacggcctcttcaaaaaatggtgcttgaaaaactggatatccatatgcagaagaatgaaactagactcctatttcttaccatgtacaaaaatcaaatcacatggattaaagccttaaatctaagacctgaaactatgaaaatactagaagaaaacattgggaaaacactttaggacattggtctgggcaaagatttattgagtaagaccttaaaagcacagttaaccaaagcaagaaaaaaaaaaaaaaaaggacaaatggaatcacatcacactaaaaagcttgtgcacatcaagggaaacaatcaacaaagtgaagagataacccacagaatgtgagaaaatagttgcacactatctgtctgactagggattaataaccagaatatatgaagagctcaaacaactcaataggaaaaaaaaaacaaccaataattctttttttttttcccaagacggagtttcgctcttttacctgggctggagtgaagtggtaccatctcggctcactgcaacctccacctcctgagttcaaccgattctcctgcgtcaggctcctgagtagctgggactataggtccatgccaccacacctggctaaattttgtatttttagtagagacagggttttaccatgttggccaggttggtctcgaactcctgacctcaggtgatccacccgcctcagcctcctaaagtgctaggattatgggcatgagccactgtacctggccataattgatttttaaaaaggcgaaagatctgaataaacatttctcaagacatacgcatggccaataggtaaataaaaaatgctcaacatcactagttatcagagaaatccaaatcaaaactataatgtgatatcatctctccataaatggcttttatccaaaagacaaactataaaaaatgctggtgaagttgtggagaaaggcgaactcttgtatactgttggtgtaaatgtaaattagtacagctactatggagaacagtataacattaaaaaaaataaaaatagtactaccatatgacccagaaatcccactactctgtatatatccaaaagaaagaaaatcagtatatcaaagagatatctgtactctcagcaatattcacaacagccaagatatggaatcaacctaagtgtacatcagtgaatgaaaggataaagaaaatgtgatccttatacacaatggaatattactcaaccataaaaagtaagatcctgtcatttgcaacaacatggatggaactagaggacattacgttaagtgaaataagccaggcacagaaaaataaatattgcatttcctcactcatgtgggagctaaaaaaaaaagacaactcacggagacagagagtagaaggatggttaccagaggctgggaaaggtaacaggcaggggtggataaaatgggacttgttaataaatacaaaaatacacttagataaagtgaataagagctagtattcagtagcataatagggtgactatagttaacaataatttattgtatatttaaaaataactaaaaaaagtggaactagaatgttcctaacacaaataagtgataaatagctgaggtgatggatgccctaattacctgatttgatcattacacattatatgctggtatcaaaacatctcatgtatcccataaatatatataacaattatgaactcatgaaaataaataagttagcttaaaaatgctagctttttataggtcctcaatatagtggaaaaaatggtaagcagtaggaataaatatgtaatgctagaaagaaccgagaaatttttaaggagtggggctgctggtagcaatattccttgtctgtatttggacaaaaatgtttgtgtttttgcaaggctgggtttgctttatttaaatataaacaaaaacaaaacaaaacaattaaaaaaataataaataaatataaacagcaactatctacataaactttcacatacctgttggaaagaggacaatttctctagaattatacatcagtcaaaaaaattattgtgtaatataatttacctgtctgtttaagccatcccattgcaaagcagggacacagtccttgtgaataaaaagcagactaaaacaattttcactttcaagtcagttctttcataaaggaataaaacagtgaaatcacaaaatttcttcattctcttccaccatatgggtttctttgaggtttaataatattataaataaagcagcactgagatgaaatacaaaacagtgaacaacaatttagaaacattttgaaggagcaagtattatattctagcgttgccaggctttcagcataagtaagatagaaaacagagcgcgaactctcatttgttctatcaagaaagcataaatattgggttcttattaagacatcctcttgcagctgtacaccagctctcaactattaaaaaagattcttaaattcccagggaaacaaaagtcaatttcagtcatataagtttgcatataaactttgctttattccaaacattttttcatcaaggaatttggaacaacaattttttgaaagagagtcttcagttcacctattacaccattataaatatttgaatgacctccagcaactttgcttagaaaatttcaatgtctgtataacatgccaatgacagcgcagcactagggtcaatacatttcattatttggcaagataaccactcatagcaatagattgaaattcagattgtcattttcatgtgtttcactttcatcacagcacactggatggttgctcttgacttttcttgccctcttggcaagatactcatttgtcagattatattaaaattttgttttatctgttaaagcttagagagtgagctaagtgatactgttttaatcccaaatcaatatgtgtagtcaggtcttgaaagaattccaatcattgtagcccttgttcatattttaggtggttaataatgctatcgtgtcattttccttggagctcattttatatattctgtttgtaggaattatagtgacaattgatcacatagcctaaacaaggaaatggatgtgatatgcattttctgggttttgtaagaatcttcactggcaaagtgaaatattatatatattttcttaagcttggagaaatagagtagaggtgtacttctcacactttagtgagctttagaatctcctggagaggtggttaaaacaaacttgtaggtctcatagccagagattctgattcagtagacctgggtagaatttgagactttgggatagattctcagttgttgctgatgttgccaattcaactaccatcctttgagaaacaataaaataatatggagtggtcaatagcaaaggctttgccattaaacaatcttgggcttaaatcctgctttcttgtttaaagatttgttgatttgaggtaatttatttccactatttttaagcctttgtttctcatctgctcattaggggttttgtatgtattaaataaaatgatgactgtccagcacttgatatagtgctgataataaatgacagccacagttattagaaatgtggtcatctcttttgctgggatctgtctggttaaccacgcagtgcttctgcttcatatcttggtgtatttggcaaattatttgtcagttatgtctagattaggagttatctgattagtgagctagcagctattcaagacttgaattgctcaggtgggccccaaaacacttaaatatctttatctttgggctctccttaaacaggaactccaactaaacactgtactaacattttgtttggttctgtcctttaaattattttccatgtaaataactttatagttccacagttatgtcttcttatgaatgatttttaaaaaatgaacatcagcttattttcaaaatcaaactcaagtctttggagactaatatcctttctctccatattttgctattaagagggctggtgttctgccaaggcaacgtattaataaatttaagcttgagattttcattgtcatgcgaacgttgaaattggccctcaattacacaaagcagccaattcagcaggatacgtgaattggatttataacgaacacgtttgtgaagaattacttttaaatccctgattttgtggtttatttctaattcgttcaaaaagcatgatccagcagtcacaaaagtctcagccaattcagaccaagtttattttgagaaatacatgattttactttagtcaagtgttaacaaataaattggttttacatttaatcattttttcagttgttcacgtaatactaaatcccatcttgctggtaggcactgggctagacactagggaaaacacttcatcctcccacagcctatagtctagtgaaaaaggtaaaagtacagctgttagaacctcattttaacaggctgataagtctccagtccttattagttgataagtgttagaaaaatatttgtgttcatacccaattacccatgaatctattaaccatcacccaaaacttcacacacttcactaggtggtgtcttctagatgtggtatcctccagggtgtctagccaaaggagaactttacatttcctatggttgtattcgtaaaatgaacatagagacggcaaatcaaggcagctctgtagtttgcaattagctgtcacttaaactctctagcaaaatgatgtgattgaagacaataacagtctatacattaaacttgattggggggattttcatacaatgcagaaatttacattcacatgatctgttatgaaatgaatgtttgtgttctctaaaaatgcatatgttgaggccctaatccctaatgtgatgctatttggcaatggggcctttgctaggtaattagggctagacaaaatcatgagggttggggcccttatgatgggattagtgcctttataagaagaaacaccagagagcttgctctgtctctctcaaccatgtgaggacatagtgagaaggctgccatctgcaaaccaggaatagagatctcaccagaagctgaattggttggcatcttgatcttggacttcccagcctccagaatggtgagaaataaatgtctgtggtttaagccaccaagtctatggattttgttatggcagccctagccaactaagacatgatcttagaaagatcacagggatttgtacaaaattacggaaacgctctaaacttatctcttattatatccaaatggggcccctcaaccccagtctgccaggccggctctttaccattgcctgaacacaatttgctctttcttgcctctactacatactcctccttgtgctgttttctttacccaaaatgccctcccccaatcttccacttctagctgagaggctcatctttaagaaatcttgcctgattagccctagtcctttcctaaatgatccttcattacaaacttcatgtttcaccatgcactcacatctatctcactctattgtgtccttatgttggttcaaggctgtaggtcttatctcttcaactagaccctgagcattcccaagacaagcctagggtctagatgttaaaaatcttttgtgtcctccactggctctcttagagtattgtgcacatcaaatgggaataaaacttactgaatgaaaattggactggatgccaagagccaacaaatgttctaaggcaaatgaatcaagtagtacggggaagcacaataaaaccctgaatccagaggctgtgggtgcagggtggggtgagagttgttctggataagtgagtttaatggatggctgaggatttatctttttgaacatcaaaagttttacttttaattatcttggatggaaacatttccagtatagcaaacttaactgcgttctcaaatagtgcattatgaacatgatccagccagaggactcggggttgtcattaaagcctataacgctgagaagccctcaggcccctctgaggtttgcagaactgtttgtccctattctaaatggctgcagatttctgtgtttttattgttgttttgtttttttggctcttctgagtcctcccttgccgctgtccatctcactgatgtccatgtgagtgtgccatttctattccctgatcctaatttgctgcttctcatctaaaatgagttggaaatcagatgcccaagctcactgtggttgttgtcatgattattattgttagaaatgtgtgtaaacgaagagaaaagggctctctgtgtgagggcttgccggagtctccatggccaaactgggcaagagtcaaacacatctatgttgtgaacgccgagtttggctgctccgaagacttttaaatttatcctctattcttacttttctgttctgaaaataaaactttctggatatatatgtttcagataaattcagtcgggtattcaacaaataacattgtttgcaaagtgcaagatgcatgctaggcactgtatgatgaccctctaaaatgaacattctatatctgtctggctcaccattttctatattgcattagcacagcacaaatactcaataaaaatattagttgaacaaatgaaatgaatcttataatttgggcagtgatgagatactcacatactacacacacaaacaagcttacaatgtaaactacagagcaagtcatcatagagatacaactaaagtctacacaaagaccaaaagattattttctgctgaaaaaaatccagaaggactgcctggaagagatagtagctttgactgggacttgaaggatggtgtcatatttcaatcagcgagaagttagggaagtaagaaaggacaagaacactgcagacaagacccagatgctagaatgggtagggtgtatttgggagttgatgagtacattttggctggagagcctgtaggggagtaggaggagatcacattataatgttatattggggtcagagcatgggtgggccttgactatcaggctaaagaatttggactgtgtttattaggtgaagggaaggagctgagggtttttgagctgggaggcaacatgcttagacctgggccttagaaacatcaccttgatagaagttgaaatttaggagttgaagggaaacagggctagaggtgattccaagggtataggtgagaagtgatgtgggcctgaactagaatgttggcaatggaaacagcaaggcggaataattgccaacgatgctgcagaggtagaataagaaaacttggcaatgtatttgttgtcaggagtgacacagagggacacattgagtgtaattccaagtaatgtccttttgataacttagagagtccacaagaacaggttttagagagatggtgatgagtttgatctggaatatgcttaggtatgagagtgaactgttgatacctctgctgtaaaaacatgaataaatgctgggcctggtggcacatgcctgtaatcccagctactcaggaggctgaggcacgagaatcacttgaacccgggaggtggaggttgcagttagctgagatcacaccattgcactccagcctgggtgacaagagtgagactctgtcttaaaaaataaaataaaataaaataggccaggtgcggtgggccacgcctggaatcccagcactttgggaggccaaggcgggtggatccagagggcaggagactgagaccatcctggctaacacagtgaaaccccgtctctactaaaaatacaaaaaattagctgggcgtggtggtagacgcctgtagtcccagctaattgggaggctgaggcaggagaatggcatgaacccgggaggcagagcttgcagtgagccgagattgcgccactgcactccagtctgggtgacagagcgagactccgtctcaaaaaaaaaaaaaaataaataaataaaaataaaataaatgaaataggccaggcctggtggctcacacctgtaatcccagcactttgggaggccaacgcaggtggatcatttaagttcaggagttcgagacccgcctggccaacatggtgaaaccccatctctactaaaattacaaaaattagctgggctggtggtgggcacctataatcccagttacaaagaaggctgaggcaggagaattgcttgagcccaggaggtggaggttgcagtgagtcgagattgtgccattgcactccagcctgggtgacagagtgagactccatctcaaaaataaaataaataaaaataaaataataaaaacatgaacggaaacgacactgaaaaatactaaagagagaattaatactcacaaaatgagtgcttatgtggattcaggccacaaaaaggcattagaaggtccatgtctcatttttagtcccttcttgataggactatggtaaaaagtattaattcttcttttcaaatgcttccaagtgaacctttaaaataaagcttttacttctttttctaagagactagtcttgataagacggaagcattaatgctcttcaaagtgtgagcatttttggactagctcatggaagtagctgtagatcctctcatcagaaacaaaggtgtttttggattagcagggcaactcaccaggaataagtagggaagctaagacactgcactggatttcatagaatggatgtgtaggattttgacctgtaaataagagggaaaagttcattctagacaaaggaaactgcgtatataaacctggtgtgataagaatgataaggcatggtcaagaactggcaagaagcgatttccatgtggctggagcacctgcagagagagcatggggagatgctgtacaattagggaactagatggacactacgctactgatgtgctgctggaagcaaatgaggatctgagcaaatgaggttatgaatgaagctactgaccagcctacagtggcactcaatgtgtgctcgctaataggctgttcatgttgacaacagcttttggcccatcagaattggatgagcctcctcttaggttcaaatcagcttcagcagtaggttgtgggaacagaggccttgaagtgggaaagattccagaagattaatattacagccagcaaccaagattcacttttggcttggggcacaattttaatatagaagacaaagggaagcaaaatgccatcttgtaacatgcatagcaccctaatcattctggacaggaacatatcaggtccttgggggtcagtgagggggataatatagtttctaaacaagtccaaggggaaaactgcaagggctatacaccaaagagactctattccttttttaaatgcagtagatatgtcaagcaattctatcctgtagaattgctctctccaacatggtagcactagccacatgtggctattgagcatttgaatgtgactagtctgaattcagatttgccgttgagtgtcaaatacagtttaccatatttcaaagacttaatatgagaaaaaagtataaaatgtttcattactgctttttgtaccagctacgtgttgaatacaatttcagatatattgggttaaataacatatattataaaaataaatgtttctttttactttgaaaaatatagcttttagacaaaattaaaataacttctatggcctattatactattggtcagaacttctatagaaagttcatattgcaatcataaaattgctctatttcctctgatttttctgaacttttttcctcttagggaacttgccaatatgtgtactaggaagaaattcaaactgtaataaacaggttaatgcattcttatctattgtctaggattgtttatctgcattttaatgtttccatggagatcagtgcaactgcaggctcgttttgatagccatggtgttcagtacagtttgcatattataaaaattatttaaacaagaaatttgagatggtttattatttggggacattaaaaagcaaaaaagtcaaggaggggaaaaggtctcataataataactttcatgtcaggcaagttgtagtctgacatgttcacatcgagtcaacctttttaaagaagaggttattgcaaaatactcttgcaaagagcttggagccaatatctctattagaagatcacataacaatagcaaattctcaagaaacagtacttgaaggatcattttgctttcacattggtaaacagcaagcaacttcagaaagggcattcctggattcaactgcagggcttccaattattattactttcctgtggactagtggaaattgtcatgtttggtcataacactgacattcagcttaatttgtcttaattttgcaaaccttcctgcttcataccaacaatctcccatgattctacaaatttggtacgtgttagcattgaacagaatgtgaaatagccccaaggagtctccaccaatgaaaataaacttaagcaagggtctgagacatcctgtaaagtatttaactacattttgcaaggctctttgcatttaggaagtaagtttgcttttaaatagaagtggtctctttaaaaaagcaaagcattattcactgtttctgaagtgtaagcaagcaaaaaaaaaattcaaaagttaaataatgactatccaattcaaagggaagagttacaacctgaggcgtgcctaccacatggaaggtctgcggtgctttaaaaaagttgggagcagtttaactatgtatatggacagtctgatagtacttggtagacagtgaacattttggaagaacgggcagttcctaaatacctgtcaccagggttatattgcagagcgagatgggactgaaagattctcatgtcaagcctttaatatcagcacaacaaaaatgacttcatctgtgcaattaatgaacaagctgttcccactcgtgtaatagttccaggagaaacttattttgactttgatttgtcccggttttcctctgcactgaatgttgtaaccttgtcgactaaaatctcttggcctaataattacagtcaacattgaaaagctctgccctcaaattattagtacaaataaaaggagggaaaaataaattaaacttggcccttccacccccatgtgatggatgacatccacctgcaccttggaagttttgtgctcgaaatgtttcagcactttttcatctggaaaatcaaactaagtttctgctaataaattaaatttacagagttgtgttttgctactactatcattgctttactagcctgtttgggcagtgtagttcctaaagttgaaaaataattgcattcttttacttaaacataagaaactctaagagatccttttcatttccattcggtttcaactgtttaaagtgagatcgcttccagaaatgtatggttactgtgagggcaatgtataataagagctaaattgtgacttgagcatctcacctagaagaaaactttcagttattaacatgctatgtctcagaaaaaaaaaaaaaaaaaggctgtgtgttttaactttgactcaacagtaagcccaaataagcaaacttattgctcttcttcattgaaaactgaaaagaaatatccaaaaacctctctaaacaaatcatacttccagtcctgatctatcttgctagtgataagccctcggagtctagggactacaattcaagttgttaagtgaagccaattccttctaggacttaaggatctagatttattattctaaagtaaaaaataaatgtagagcaaaagcaatacatcaggaaatgctccctttaaaagcagcggtgataagtcgtttatgctgtggctgtctgctggtactctcactaaattccactttaagttgaggagaatatgttaagagaatatatttaagtgaaattattttcacttaaaattcattttcatttaattcacatctgattcttttaatccaaataaagtgttattttttcttttaatgctggaatgatgtatgcaattcaactcttgtcatttcaaattacaaacatgccagtagggataaaagaagaccagctgtagtgaggatggagggagcctaaatgcctactatgtgctaacacagttaataactttgaactgaatttactttattcttctgatttaagagacaattttacccaagacattttttttttaagcaggtagcctggtagcgtgtaagagacagaggcaatatgccaatactagccattctctagcactttctagtgttcagagcataaattataatgtgagaccagggccacgctaaattattttggcagatcagatgtacgaatcatttcctctgaggaaaatttaggccactggattagactactgtttgatgggtacacaactgatgagagattctgctcacaaagatatcagcagattaagtcaaacagaggaatctacagtttatttaggtcctctcttggaaatttttttctaaacattttaaaagttctatggaaggccggttgcattggctcatgcctgtaatcccaaaacatcggaaggccaacgtgggaggatcacttgagcccaggagttcaagaccagcctgggcaacataatgagacccgtttctgaaaaaaaaattaaaaaaataaattttatggaagtatgttaaccacaccaagatggatataggagagtcaatatttcaggagagtaaatggaactgataatgtttacttcctaaatgcaaatggttagagaaatggttagaagtaaaagaaaaaaagtttattgaggacaatactgaaggaagcagacctcattcattcaaaaaatatttaatgaatgtctactatgtgccaagttctattctaggtgctagcttaatttcaataagctcacattctaactaaatttaagactctaattgaagttaaaacattgaagtttcacttatggccataatagagtagccagaacaaaatttgccctcctttcttaaaaaattaaaaattggtcaaaaatctatgagacaatgattttcagacattagaaaaaaggcattcccccgaaagggaaaaaaaagccaggatgaacctgaagaatgacccagattactggctaaagaatttccaggtcactgcacaggaatgggaactagcctagtttggtgatctccctgagctgaagagacagaattcagagttcagagaggccaaggcagctagacttcatagaggggcgaagtacaggatagaaggaagctgcaatgagagagagagagagagagagagagctccagatatctgcagagggtccctttgagtctttaggtgagtaataattagtgcataaatttgaggaaattatcaagctcgagaagaaaccactgaaaaggagcaggtagagcaatacttggagcacacacagggctgggaatattttacgttcccatgagctacagtagaaagacttcttaacacaaaagaaactgagtggagccttccaaaggatattgcctcaatagtagtgtcaaattatcccgagactaaaggctgttctgcacccaccaaacaaagctaaagagcaagccttgaaaacatcacaccgttttcaagtaattttttttttttttcagatggagtctcactctgttgcccaggctggaatgcagtggtgtgatctcagcttactgcaacctctgcctcctgggttcaagtgattctcgtgcctcagcctcctgagtagctgggattacaggcatgtgccaccatgcccagtggctaatttttgtatttttaatagagaaagggtttcgccatgttggccaggctggtctcaaacttctgacttcaagtgatccacctgcctcagcctcccaaagtgctggggttacccgctaaattacttgcctgtttgcaagtaatttaactgcattcttgtgcaaagaccaaaaatattgaaaggattacaaacatatccagcatctctcaaaaaataagtttacaatatctgacattaaataaaaaattaccagacatgcatggaagcaggaacataagatccatgatgggaagaaaatcaataggagcagactcagtgacataggtgatggaattagtagacaacaacattaaaacagctagtataaatttatcccatatgtttaaagtgtatgaggaaagcatgagcgtgacaagaagagaaatggaagctatgaaaagagacccaagtcaaacctctagagttgaaaagtgcactgaatgtagctgaaattaacagcagatcagacatcacaagaagaaaagagcaacggactagaagttcataatagaaactacctaaaatgaagtctgggtgtggtggctcatgcctggaatcccagtactttgggaggttgagtcaggcggatcatctgaggtcaggagttcgagactagcctggccaacatggtgaaagcctgtctctactaaaaatacaaaaattagccagatgtggtggtgcatgcctataatcccagctacttgggaggctgaggcaggagaattgcttgaccctgggaggcagaggcaacagcgagccaagatcacagccactgcactccagcctgagtgacagagtgagactatctaaaaaaaaaaaaaagaaagaaaagaaactacctaaaacgaaacacagagactaaaacattgggggaaagcctgtgcaacattgccaaaccctgtctgtacaaaaaataaaaatgttggctgggcatggtggtgtgtacctgtagtcccagctacttgggaggctgatgtgggaggattgcttaagccctggagctgaggctccggtgagctacgatcatgccactgtactccagcctgggtgacacactgagatcctatcttaaaaacaaagaaagaagcaaaaccaaccaaacaataaaacagttgggggaaaaaatgaatagaccatcagtgagcaagctatgggcaacatcaagtagcataacaagtataattggagttccaaagggtgaagaaaggaagatggggacagaaaaaaatatttaaagaaacaatggctgaaattttccacatttgataaattcggagcatggcttaaaagatacagggcctttttctcatcataaaccactacttctgttgtcctttcacctcgaatgctcttgctctgtttcttcaccttcacctaacacactttcagagtaatcctctaaaagaacattcctagacccgtccaaatgatttagtctttttctgaacactgaaactttttggccagatgcaatgaatacttgtttcaatgaatacctgaattcttgtttgcaatgaatacttgtttctatagttgactttttaatttgtatgcatttttaaatttgccatgtttgtatctttcctccactcaagctttggattctgtcttcttcccaattcacaagatactttctccctcaattctcttcttttcctgttcagatctctacgagcttttgaagtataaaaggtttaatggtcaaaaagcctaccatgacccttctaccccacttgacttctggctgttttatcttttcccctcacaccaaggcactgaaaagatttctgtatttttttcataccccatttataccacaacatgctaccatatggcttccatcttcatcattgccccgaaatttttctcatcaaggttaccagtgacctatttgctaccaaatccagtgtattcttttagcttaatctttgtattttttctcctcttttttatttttaatttttgtcagtacaaagtaggtgtatatatttatagactacatgagatattttgatacaggcatgcaatgcataataatcacatcagggtgaatggggtatccatcccctcaagcatttatcctctgtgttataaacaatccaagtatacttttagttagtttaaaatgtacaattaaattacttcagacttaccctgtggtgctatcaaatactaggtcttattctttctaactattttttggtaccctttaaccatccccactcccatcccctgacccctactacccttcccgtcttttggtaatcatcattcgactctcaacctccatgagttcaattattttaatttttagcttctacaaataagtaagaacaggtaaagtttgtctttttgtccttggcttatttcacttaacatagtgaccgccagttccatccatgttgttgcaaatgacaggatctcatttcttttttaatgagaatgtaagtaccccattttctttatccattcacctattaatggacactgaggttgcttccaaatcttggctattgtgaatagtgctgcaacgaacatgagagtgcagatacctctttgatatactgatttcctttctttttggtatatattacacctagcaatgaggattgctggatcacatgatacctctatttttcttttttcaggaacttccaaactgttctccatagtggttgcactaatttacattcccaccaaaagtgtatgagcgtttctttttctccatgtcctcaccagcatttgttattgcctgtctttggacaaaagtcattttaactcgggtgagatgatatctcattgtagttttgatttgcatttctctgatcatcaatgatgttgagcactttttcacacacctgtttgccatttgtttgccttcttctgagaaatatctactcaggtcatttgtccattttaaaatcagattattagatgttttcctatagagttgtttgagctctttatatattctggttattaatctcttgtcagatgggcattttgcaaatattttttcccattctttccattctgtgagttgtctcttcactttgttgattgtttcctttgctgtgcaaaaggttctttgtttgtttgtgctttattttttgagacagggtctcactctgtcgcccaggctggggtgcaaaagctttttaactcgatgttatcacatttatccattttcaatttggttgcctatgctcgtagggtattattcaagaattctttgcccagtccaatgtcctggagtttccccaatgttttcttacagtagtttcatagtttcaggtatcagattctaagtctttaatgtatttatatttgatttttgtatgtggtgagagataagggtttagtttcatttttttttttttttttggcgtatatatccactttccccagtaccacttattgaagagattatccttctctaatatgtgttcttggcacttttgtcaaaaataaattcactgtagatttatggatttatttctgggttctctattatgttccattgatttttgtgtttctttttatgccagtaccatgccatttcgtttactataggtagctctgtagtataatttaaaatcaggtaatggtgattcctccagttttgttctttttgcttggaatagctttggatattctgagtcttttgtgtttccatataaattttaggattgttatttctattttttgtagaatgtcattggtattttgacaggaattgattgcattaaatctgtagattgatttggataatacagacattttaacaatattgatttctttcaatccatgaacatggaatatcattccattttttgtgtcttcttcaatttcttgcatcaattatagttttcattgtaaagatttttcacttctttggctaagttaaaaccctggtattttattttattttattttattttagctattgcaaatgggattacaatgctttttcagattgttcattgttggcatatagaaatgttactcttttttgtatgttgatttgtatcctgaaacttcactgtatttgtttatcagttctaatagagatttggtggagtctttaggtttttctaaatataagatcatattatctgcaaatgttaataattttacttctttctttcaaatttggatgccctttatttctattctttcttttgtctaattgctcctgctaggacttctagtactaagctgaataactggtaaaagtgggcatccttgtcttgttccagattttagaggaaaggctttcaggtttgccccattcagtatgatactagctgtgggtttgttgcttatgtcgtttatcatgttgagatatgttctttctatttctttgagagttatcatgaagagatgttgaattttatcaaatgttttttcagcatcaattgaaatgatcatatggtttttgttctttattctgttgcttaatgtatcatatcaacatccttgtatccctgggatatattacacttggtcataattactgatatttttaatatattgttgaatttgatttgctagtattttgttgagggttttgcattaatattcatcagtgatattggcctatatattttttttgatatgtctttgtctgattttggtatcagagtgagactggcctcatagaaggagtttggaagtattgcctcctctatttttcagaatagttttaagtaggattggtatctttctttacatgtttggcagagatcagcagtgaaaccatcaagtcttgagcttttctttgctgggagactttttattatggctttgatcttatcagttgttattggtctgttcaggttttggatttcttcatggttcaatcttggtaggttgcatgtgtctaggaatttatccatttcttctaggtattctaatttattgacatatagttgcccggccgggcgcggtggctcacgcctgtaatcccagcactttgggaggcttaggcgggcggatcacgaggtcaggagatcgagatcatcctggctaacacagtgaaaccccgtctctactaaaaatacaaaaaattagccgggtgtggtggcagacgcctgtagtcgcagctactcgggaggctgaggcaggagaatggcgtgaacccgggaggcggagctcgcagtgagccgaaatcacgccactgcactccagcctgggcgacagagcgagactccctctcaaaataaataaataaataaaataaataagacatatagttgctcataatagacactaaagatcctttgaatttctgtggtatcagttgtaatgtctcctttttcatctctgattttatttgcttgggtcttctttctttttttcttagtttggctaaagtcttgtcaattttgtttatcttttgaaaaaacccacgtttttgtttcattgatcttttgtattgttttcttcatttcaaatacatttatttctgttcttatctttattatttcttttcttctactaattttgggtttggtttgcttttgtctagtttaattatgtttaagatgcatcattaagttgtttatttaaagtttttcttcttttttcatataagcacttatagctataaaattcccacttagtactgctttcactgtttcctataggttttgttctactgtatttccattatcatttgtttaaagaagtttttgattccctttttaatttcttcattgattcattggtcattcaggattatattgtttaatttccacgtgtatactttccaaaattcctcttgatgttgatttctagttttattccgctgtggtcagagaagatgcttgatattatttcaattttatgaatgttttaagacttgttttgtggtaacatatggcctatccttgagactgattcatgtactgaagaaaagaatgtatattctgcagcagttggatggaatgttctgtaaatatctattagatccacttggtttatggtgcagacaaagtctgatgtttctttgttgattttctgtctcaaagatctgtccagtgctaaaagtgggatcatgaaatctccagctattattgtattgggatttgtctctttctttagctctagtaatagttgctttatatatctgggtgctccagtattgggtgcatatatatttaaaattgttgtatcctcctactgaattgacccctttattattatacagtgacctttttttgtctcttcttatagtttttgtcttgaaatctattttgtctgatataaatgtagtgactctggcacttttttggcttgcattggcatggaatatctttttccatcacttaattgtcagtctctatgtgtctttacaggtgaagtatgttttctataggcaacagatcactgggttttgtttttttaatccattcagccactctatgtcttttgattggagagttagtccatttacattcaatgttattattgataagtagggacttactcttgccattttgtgatttgttttcgagttgttttgtggtcttttttcctgtcttccttttagtaaagtgattttctctggtggtattatttaatttcttgctgtttacttttttgtgtatctgttctatgttttttgatttgagattaccatgaggcttgcaaatactatcttataactcatcattttaagctgataacattgtatgttatttgcttcttttctcttgctgtttttaggagcctttccttatccttgacctatgggagtttgattattaaatgccttgaggtggtcttatttggtttaaatctgcttggtgttgaaaaaagaaaaatttcagccgaattaaatttaaaggagtttaattgagcaataaatgattcacgaatcaggcagccttcccagccagagttggcttggagattccagaacagccacatggtggatgaaaaaggaaagtgatgtacagaaaatgtaagtgaggcacagaaacagctggattggttacagcttggcttttgccttatttgaacacagttcaaacagttggttacatttgattgaccaaaactcagtgactggcacaagtgtaggctacagtctggttacacctccacttatagctcatgatgtacagaaaaacctttaggtccaacttaaaaaacgttggacctaattctataaccttcttgtacttggatattaatatctttctcaaggtttgggaagatctctgatattacctctttgaataaactttctacccctatctctgtctctacctcctctttagagccaataactcttagatttgcccttctgaggctactttctaatcttgtaggcatgcttcattcttttatcttttgtcttgactgtgtattttcaaatagcctgtcttgaagctcactaattctttcttctgtttgatcaattctgctattaaaagactctgatgcattcttcagtatgtcaatagcatttttcaactgcagaatttctgcttgattctttttaattatttcaatctctttattaaatttatctgatagaattctgaattccttctctgtgttatcttggatttgtttgagtttcctcaaaacagctatttgaattatctgtctgaaaggtcacatatctctgtttctccaggattggttcctggtggcttgtttagttcatttggtaaggtcatgtttcccttgatggtcttgatgcttgtggatgtttttctgtgtctgggcattaaagagttaggtattggccaggcacggtggctcacgcctgtaatcccaggaggatcacgatgtcaggagatcgagaccatcctggctaacatggtgaaaccccatctccactaaaaatacaaaaaaattagccaggcacagtgacgggcgcctgtagtcccagctactcgggagcctgaggcaggagaatggcatgaacctgggaggcggagcttgcagtgagccgagatcgcgccactgcactccagcctgggtgacagagcgagactccgtctcaaaaaaaaaaaagaaaaaaaaaaaaagttagatacttattatagtcttcacagtctgggcttgtacccatccttcttgggtacagctattttcaggtatttgaaaggacttgggaatatttttatctaagccttatctgcattaggggacacccccagcccagtaatgctgtggttcttgcagactcatgaagggaccattagtggtcttggataagatctggaagaattatctggattaccagacagatattcttgttctcttcttttactttctcccaaacagagtctctctctctctctctctctctctctctctctgttctaaggttcctggagctgggtgtagggcaacaaaagcacccctgtgggcaccaccactggcattgtgcttggtcaggcctgaagccagcacatcactgagacttgcccaaggcctgctgtaaccattacctggctatcacctttgttggctcaaggccctggggctctacaattagcaggtggtgaagccagtcaggtttgtgtccttcccttcagggtagcaagctcccccggtccctgggcaggtccagaggtacagtctgcgagccagggactggagtcaaaaaccttagaagtgtacctggtgttctattgtagtgcagctgaactggcactcaaacaacaagacacagtccttcccattttcccctcccatttctacaggcagaggagcctcactccatgaccaccaccaccataggcccacagggtatactgccaggctaccactgatgttcccttaagacccaaggggttttcagtcagcttgtggcaaatgcagcctggcctggaactcacccttcagaacagtgagctccctctggcccacagcaggtccagaaatgccatccaagagccaagtcttagaagtggggacctcaaaaacctgcttggtgctctacccccaaatggctgagctgatacttaagggcaaaacaaatctcctttacttttctctccacttttctcaagcagaaggagtctatccccataactacaacagatgggaatgtactgagtctcacctgaagccatcagtcttagagtctcacccaaggctcatggctcactacttgggtgtctctgctggttattcctggcaggtccatcctttctcctcttcccactttatatcttacgttttccttcatgatttcatccatgtccatggttttatctgtccattttaggctgatacttccaaatatatatgccaggttgagatttttctcctaagttccagaattgctatatctcctggacagcttcactgggatatccacaagtgctccaaagtaaacaagtctcaaatggaattattctttcccttaaatttgttcacctctgagctctttaatctagtaaatgggacctactcaccatagccttaagtcttggcattatccttgatttctctctccttcaaaccccacataccattggccaccaaatcttgtttatttgcttttaagcatttctcaaatgggtctcctttctacccctacagccagtgacttacttcagaccttatcatttctttaggacttattagtcttatctccctgcttctgaccttggtttctttcaattagtcccatagagcaaacaaacaaacaaacaaacaaaaaatgacctttctgaaatattaggtcgatgcaaaagtaattgtgatttttgtgtgtgccatttttaaggcaaaaaacacaattacttttgtaccaccaacctaatacaatctaattattattgtttccacacaatttaaaaataaataattctctgtaggcttccagataaaacttatgttcgccaccatggcccatagtaccctaacctgccaccttcatctcttaccacattctgaattactcagttccctagatgccccatgctatctcatagatcccagtatttccacatgctgttccttctgctgggtcttgctccctgctactaatacctcttcatggcattcttcaagactcaggtcagacacttccacgtctgaagtttccctgacgttccccttttccaagctgagattgggcgcccctcctggtatatgtagaaaatagtccatatatattatctgtgaagacttgactttgatttttaaaaagtatctgttcatggttttcccatcactagattgtgagtccctccctgccctctctactatctatcctctgccctggcttagtttttcttcaagtacttatcaccatctggcatgctaggtttgtctctatccctcaaaaagaatatgagatacatggaggtggagatgttttacctgttatgttcactgcaatatccttgacatctagactagaacagtatctggcacgtagtaagcactcagtagtcatttgtgaagtaaacaaataaatcttcgccctgagcacttactgcagtatctaacacataatatgggttgttacactctactgcaacctcgtttactcatctgtcaccactacaagactgtaactcctcaaggtgactgtattttgtttatctcagtatctccagtgcttagcatattttttttggcatatactataccgaataaataaatctcttcaatactgcaaattcatcagggcaggtgtaaggtcccacaacacctggaatattgccttccacataaaagatatttgatgaatgtgtgtttattgccagctgaacataagccacaaacaaaatgctttataaaagtgaggcataataccagggtgtgtgaatagcattacacatactcaaaatcattttttgaaactcaaccttgggggtcttatcatttcaagttaagaattagatgtttacactgttaaaaaataaaatttatgagaggagtgtaataaattgggattatttcataaattgttttctttatctgaataatgcaaagatttactaatttattagaggtaacaaaatggtgatattttattttgattattttttctaagctggaatgtttctaaaaagacacattttcgctcactgactatttgattaccctaaagaacaatttgtatagaaaatataacattctttttttgtttgtttcaaagtaatgagttagttcacttgcattcttcaaagaaaaatagtatatttttatttttaactttttgtacctttgtgatctaatggatttaaacatacttaaagtgttttcaagtcattgcagttattatctttattgatcctcaattatcttatttggccagtggaaatctatgcaagccagttcttggatagttgttttattttgagacagggtctccctctgtcgccaaggctggagtgcatggtgcaatcttggctcactgcagcctctgcctcctgagttcaaacgattctcatcttcagcctcccaagtagccttccaagtattctcttgcttcagcctcccaagtagctgggattacaggcatgcaccaccatgcctggctaatttttgtattttttttgagacggagtttcactcttgttgcccaggctggagtgcaatggtgcaatctcggctcaccgtaatctccaccacccaggttcaagcaattctcctgcctcagcctcccaagtagctgggattacaggcatgtgccaccacacccggcttattttgtattttcagtagagacagggtttcttcatgttggtcaggctgttctcaaactcctcacctcaggtgatccacacgcctcagcctcccaaagtgctgggattacaggcacgagccactgtgcctgtcctatttttgtatttttagtagagacggtgtttcaccatgttggcctgactggtctcgaattcctgacctcaactgatctacccacctcagcctcccaaagtgctaggattacatgcatgacccaccacacccagccaagcctggcttctaatagctttcacgcttgctgaggatgacaacatcttgtccaggttcattttgtatattttctaccctgggcttagaatcaactatttttcccaggagacttgattcctcttatgagaaatggtaaaaagtcaaaagtcataacctaaggatgctcactgatattaaattgatcatgatttttaggtctttcagcacaaagggcaacagttctttcttttttaaacttttaaaaagtttatatggagacacagtctcgccatgttgtccaggctggtcttaaactcctggcagggcacaaatgatactacattttggcttcataaagtattgggattacaggcgtgagccaccatacccggccagggcaacttctttgtgtcatgtttctccagttattttggtggcctgaagctcattctctattggattcctaagaaaaatcttacgggaaaaatattctgtaattaggttcttgcatgctcttataagtattttattgtggtaaaatatacataaaataaaagttaacatcttaatttctttttgttattgttgtggttgttttgttttggttttggtttttctcttttttttgagatgaggtccactatgttgcccaggctggtctcaaactcctgagctcaagcagtcctcctgcttcagcctcccaagtagctaggatcataggtgcacaccaccctacctagatcattaatcattattaagtctgctgttcagtggcattagctacattcacattgttgtgcaccattgccaccatccatctctagaattttttcatcttctttaactgaaatgctgtacccattaaactctaatgccctactcctctctttcctcagtccccggcagccaccattctactttctgtccgcatgaatttggctactctaggtaccccagacaagtcgagtaataaaacatttgtccttgactgggcgcagtggctcacgtctgtaatcctagcactttgggaagctgaggcgggtggatcacttgaggtcaagagttcaagatcagcctaaccaacatggtgaaaccccatctctactaaaaacacaaaaaattagccaggcgtggtggtgcacacctgcaatcccagctacttgggaggctgaggcatgagaatcacttgaacccgggaggtggaggttgcagtaagctgagatcatgccactgcacttcagcctaggcaatagagcaagactctgtgtcaaaaaaaaaattgtcctttttgagtctggctgactttatttttcacaatgtcttagggttcactcatgttgtagcatataccagaaagccttccttttgaagactgaacaatattccaatgtgtgtatataccagattttgtttatccactcatccatcaatgggcatttaggatggctccaattagagctattgtgaatattgctgctatgaacatgggtagatgaatatttgtttaggcctttgctttcactccttttgggtatatacccagaagtgaaattgctggatcatatagtaactctatgtttatttttttgaggcactgatctactgctttccacagtggcagcacaattttacattcccacctacaatgcacaaaggttttaatttatctgcatccttgccagcttttgctgtcttttgttttattttttgataatagtcatcctaatgggtgggtggtggtatctcattgtggttttgatttgtattttcataatggttaatgatactgagcatcctttcatgtgcttcttggccatttgtatatatatacatctttgattttttttttttttgagagatggctattcaagtgctttgtccatttttaaattgggttgtttgtttgtttttgctgagttggagtgttgtttgtatgtttatatttgaagttccatttggttggatatgaaatatttagctcatttttttttccttggggtgtcttaaatatgttactccattatctttcagcataaactattactaccaaaaagtttgatgatgatctaatgttatttcaattagaaatgacttggtctttttgcctggatgcctataagatttttttttcttactgtttaataggtttagtaaaatatgtcttgatgttagctgttctgggtctactttcccagatacatagtgtgccttctcaatatgtaatcatttttgttttagaaaagttttattgaattgtactttttaacattgtgttacatcgtatggctttctttttcttcttcatgaactcctataacatgtatgtagaatcttctttgatatatacatatatataataaatatatatctaaagtttgtatatatataaactttatctcaaattctccacattcttgccaagagttggtatgttcagtcatttaaattttagccattccaataggtgtacattaacatctcattatagttttaatctgcattttcctcatgactaatgatgttgagcatcttttcatatgtttgtcatctgtatatcttctttggtaaagtatctgttgaaatcttttgtccttttgtttgagacagagtcctgctctatcacccaggccatagtgcagtggcacaagcttggctgactgcagccgaaacctcctgggctcaagtgatcttcccacttcagcctcctgagtagctgggaccacaggggcatgccaccatgcccagctaatttttgtattttttgtagagacggggtcccactatgttgcccaagctggtctcaaactcctgggctcaagcgatccactcacattggcctcccaaagtgctgggattacaggtgtcacccaccacacctggccctttgcccattttttaaatggtgtcttccaaagagaagtttttaatttttgtgttccaatttaccaacttggtttttatggatcatgtttctggtcaagatcaatacataaaaatatatctaaacttacctattagttctagtagctttttaatagattacaatagattttagatatagatgacaatgtcatctatgagtagttttatttcctcctctgtctgtatgctgtttatttcacttcttgcttattttactagctagaatctccaatgtagtgtcgaacagaagtagtaggcgcagacattgttgtcttgttcctgatcttaggggaaaagcatttggcctttcactattaagtatgatgtcaagtctacgatttttgtagacactctttatcaggttgagggagttcatttctgttttcagtttgttgtgaattaaaaaaaaatcggcagtggatgttggattttgtcagatgtattttctgtgcctattgagactgccatatgtttttttgttgttgttgttagtttgttaatataacaaattacattgattgattttcaagtgccaatccattcttgcattgctgggataaaccccactgggacatgatgtattattttttaaaaaattatagattctctttttagtacagttgtaaatttacagaataattaagcagatagtatatgtagtttcataaatctacctcaggctattcctccccagtttctcctactattaaaatcttgctttcatgatacatttgttacaaataatgaacaactgatacattattatgaattagtctgtagtttacattaagagtcattctttgtgttttacagttctactggtttcaacaactgtataatggggtgtgtccataattataatttcatacaggatagtttcactttcctaagaatcttctatgcttcacctattcaatcctctttttcctcctttcacatccacttatcttttactgcctctatagttttgtcttttccaaaatgtcatatagttggaatcataaaatatgtaactttttcagactggcttctttcagttagcaatattcatttaaggtttttctgtgtctattgcttgataattcatttcttcttattgctgagtaatattccattgtgtaaatctatcagtttgtttatccatttacctattaaaagacatcttggactgggtgcggtggctcacgcctgtaatccaagcactttgggaggccaaggtgggcggatcacctgagctcaggagttcgagaccaccctgggcaacatagtgaaaccctgtctctactaaaatacaaaaaattagtggggcatggtggcgcatgtctgtagtcccagctactcaggaggttgaggcacaagaattgcttgagcccaggaggtggaggttacggtaagcggagatcacaccactgcacttcagcttgggctacagagtgagactccatctcaaaataaatcaatcaataaaaaataaaataaaatgaaagacattttggttgccccaaggtttggcaaagctataagcaaataaagtttataaaacttataaataatgctgctgtaaacattcatgtgcaggttcttatgaagacaaaagttttggtcaaatatctagaagtgtgattgcaacatggcaaaattatgcttagatttgtaaaaaaaactgccaaaatatttttccaagtagttgtactatttttcatttctaccacaatgattgagggttcctatttctctgcacactcatcagcatttggtggtgtcagtgttttggattttaacctttctagtagatatgtaatggtatctcattgttgttttactttataattccctaatgctatatgacaatgagccttttttcatatgtttgttgatatctatatatcttctataatattggatttgatttactaaaatgttttaaagaatatttaccccgttttcatgaggaatattagtttgtaattttcttttcttgtaatgtctttgtctgctttcatatgttggcctcataaaatgtcttaggaagtagtttccttttttcaattttttgcaagaggttatgtggaagtggctttatttatttcttaaatgtttggtaggattcactcctgaaaccatgtgcgtttctagttttctttatgggaatgttttaaactctgcattcaatttcttttgtagacataaggctgttcaaattatttaatcttgagtaatttttgatagtttgtgttctttaagaaattttttcatagattttagccatggagttgttttttatttttctatctaggtattctgtgtttattctggccattttaagcatcctcactacacacatacacacaaaagaagggcgatgatggatgtgttaattaatttgactgtagtaatcagtacacaatgtatactcataccaaatcatcacactgttcaccttgaatatacacaattttgtcaatgaaatattttaaaatacaaaataaaaattattcttccagcttctcagaattttctaaggttttatttctaaaactagaatgacagtatagcaaagtataaaccaatataattaagaggtccctaagaaaatgtagaagtagctttactggattgccacagtgtcacatcctttaatgcaggtgaaaaattgagagatcaatattaaaatgtacttaagagacacataaaaaacatttcacaacttcactttgcagattacaatgtgaaattttaataagattaccaaaattttaagtatttggtcttgtatagataactaaaattattaatatttattataagaatattactggtatattaaacatttttgtttatataataaaactcttttctttctcacatttcttgggggaatcattcaacttctctgggcctcaatttattcattggtaaaaatgggtcaattagattagatttttgctaagacttcttctagacctcaactttaaaaaaaagtttccagtgttaactgtaaaacaaagtgtttacctctaaattgttttaaaataattatatcaattggaacataagtatatacagatgcctagcaaataatttatagatactgtaaaatgagttttttccacatttatttacttgtaagctgctaatctaaagtaatattgttttgggaagagaggaaatggagtcacaaattaatctttatacttcatgttccaaaggaagagagatgtctcttgtttaagtaatctgcccaaaatccaagtcagagtgagacttgctttggtgtcagtcctctcatttattaatcttaccaacaaaaaaggtaaaagcgagtgtttttgaaaagacaccttggcactgttgcagcagctattaaagtagaggattaaattgtgtgaatctaagctcctcataagccctggaaatcaagattgtttttgtgaggaacttgttcagaaacaaaagagttttactgaacattatgctgtctggacagtcttcaagagcacatggacacaatttattctttaacaggagccatgttctggttcagatataaaagtttcacagaaaaacactgtggggtatgtgtaaaaggaaacatttaaaaattgtattataattacagcagactataaagatacagatttagtcattgtttatattttgctcattcttggaagatttttaaaattaaaaatttttaataaaaagttctggaaatcttgaatgtggcttactatccaacttgtctttatatccaacaagaaaagtgtgcattttaaataaaggtaatctcaggcccatttggtgttttggaagcagaactgtctgtagctgatacttctggtggtattctgaaatatatccccaggcccaccttggatttcagccacagctatagtggagagttccactcaatttttgattcactttttggtgacagcaaccaaccttaaatgattgccccatttctctagtttctgatcttgtatcctttccaaggtcatgggagcaccctaggcctatgtaaaccaataataaaattccaaggccccccagccacctgaatggacatctcctctcagtcaagggcattccaacattatcctgagaaactagtttaggggatgatggaaaggggaagccagacatgcccttctcctttttggaattactgatagaccagactctttaagtctgataagaaacatttacaatctagtctctctgaagtctgctacctggaggcttcatctgcatgataaaacttcactaccccttatcataacccagacattcctttctattgattccaggtctttagataataactctttcaaccaattgccaatcagaaaagctttgaatccacctgtgacttgaaagcacctgcttccagttgtcctacctttccagcctgaaccaatgtacatcttacattggttgatgtcttctgtcaccgtaaaatgtataaaaccaagttgtggcccaaccgtgatgggtacatggtctcaggatctcctgaagtctgtgtcacaggacactggtcacttgtatttggttcataataaatcttttcaaatattttatagattttgactcttttccttgatacctgtgtgcaggtaatcccatgagtatagaggagtaatgccccccaccagtgggtccaggttagtggacaaatgctgcagccatcaggccttccagtggacaattctaaaagcactgctcatttctaaggagctgctggtcctggaatcaaatcccacatgcccataatggcaatcacagtaatatacatcttattaggttgtcttctctctcattcttcctgctctctcactcttcctgctctctcactcttcctgctctctcactcttgcttcctgggattaccaaataaattccttgcacccaagtgtttgtcccaggttctgctttaggagaaatgtaaaactttgatatgaggcatgacccttgagggcaaatcttaggatgggattctggaactggatcacttaccctttttgctgggataagtgagatggtgataacccctggtgcgcatcctaatttgtatgaatcttacctgtggtagattggcgtgagaagaagtgggttatctggtagctctgtcactacaatggtatggagacaaaggattgtggaattggctcacatttgtcaactgccttggaagccttgaaaaaaacctggcaggcccggatcagccaattatcaacttagggcactctgtgaaagccagaagtcctccttggcagtgtttaaaaaggctattatcccttcagccatagggaagctgtgctgaaagtcagatatacaatgtaactgtaaggaaggccgagtggcaaagagataaaagatgccgcctcaacaagcctcctttgctaaagtcagggccctcatgtcaaaggagtgagactctgagacctgggatgagacaattcgagtgcatgtgcttgaggatcttgagtcactgatttcttctgaaccctccatgccaaccaaaggagctatttctcccaccctagaggagagcaacctccccttacctggagaccatgtgaagtgtttgtctgaggtggatggcttgtaaaatgactcctgtctcttcaagatctaattctgccttccccgactgcttttagattaactaatctcagaattcagctgagaagaaaaatatagtccttgagctgggaagaaatagcttatttactgaaagaattttaggtactggctaataagtactggcagtaagttggagaatatgagtgaagataagtcttgtgtgggctggaccagagaggcagaatataaggctggatagaggagagtttactgacacaggagcactctcttatgactaaagatatagtatctcatctttatgacacatgagctggtcttaacaggctgttggggtggcttcttgagacttcgtcatgatggcctacactaaatgaggcaggaatgctggaaatgccttatcaaagtgaagaagaggtcagaggcagagagaggtggatatgttgattgcatttatttaatgacaagagagcaaatgtaccatttttcccaggaagggcccagagaacactctcttgattaagataataaaggatgtcactgagggtgacatcaacatctttgataaaatcatcagaagctgtacccaacaggccaggattcacagtaggatatgatgctgtagaactgggctctttagtactaattgagatgataggattccttaatggcaggaggcaggtagtggcattcaaccatcggcagcaaagtgacagcaagcctgaagtaaatgctacctatgttaccaggagtatatatggtgaacgttcacccaatctttcttcaaaggactttaaaccacttagcaaagtgaaacaagtggaatacccaatcctctcaaaggttgttgtataagggctcagttaacttgatatcaagtgatctaaaatgtcctcattgtccctcaaatagagtggaggctatggataccaggtaatagatggagtttgggctccagtccatttcacagtattttcaattgctccagtggggtccctctgattgtttccctggtctctagtgcatacctgggataaatattcttaaaagcttctcgtgagcttcctgacctatgggaaaaaaaaaatccattgtggtagggaggatcaagtgaaaaatccctaaaattgtaccttccttatcccagccaagatagcaaaccagaaacaatattgcattctgagtggaatttttgagattagcaccacttccaaagacttaaaggatgcagaggtagcatcctctgcatttaccagtatggcatctgccatggtggaagacaagggaatattatcaacttaataaagtgatagtgccaatcatgtctaccatgtcaagcatggtacctttcctggaacatatcaacacagcctctgcatgatatgtggctgttgttctgacaaacattttttcaatcattaggaatatcaagtgtttatatggaaaggatagcaatacgtattaacttgattgccccagaactatgttagctctcctgctctctctcatagtgtagtcttttttttttttaatttttatttatttattttttttttgagacagagtccttgtcacccaggctggagtgcagtggtgccatctcggctcactgcaacctccacctcccgggttcatgcgattctcctgccttagcctcctgagtagctgggactacaggcacacatcaccatgcctggctaatttttgtatttatagtacagacaggttttcaccatgttgcccagggtggtctcgaactcctaacctcaagtgatccacctgccttggcctcccaaagtgctgggattacaggtgtgagtcaccgtgcctggcccacggtgtagtcttcagggattttgttcattctcacattacacagaaccttgtgttgatcctctatactgataacatcagctgcatctatctggtaaacagaaagcagaaagaactcttggtgttctataagatgcacaccagccagaggatggaagattcagatccctacagcttttagagatccagtagtctggaaggtgctgggacatcccttccaaagtaaaggacagattagtgaactttcaccctttaccggtaagaaagagacacagcatgttggggacttctgcttttgaaagcatcatacactttctcaggaatacagctctgaattggaagactacatgctttatgtggggcccagaacaagagagggctctgctgcaggatcaggctatgatataagttgccctcctccttgaactatatggctcagattacccattgatgatagagatgtctatggtagatatgaagattgtgtggcatgtctagtcagccctaatagaagattaatagcacagaccctttgcttctggagcaaaggtcttgccttcttgttgtttgaaaagcaacacctagcatgtgcccagtagaagctgagaatctgactatatatgatatcaagtgattaactgagctgcccatcataagctgggttttatcagatacaccataaagccacctagtcacagtagcaatccattattcaatggaattatatgtttgggatgaagcctataaaagtcaataaggcacatgtaagttacatggacaagtgacctatcatttatttcccatatcatttacatctcttaacactaatgcctattcttcaacctacttgtatgatctcatgcagaatcttcaatggtcaactgtatcagttatttattgctacaattatgtggtaacaaccaagaacaataaaaaactgtaagataatcaacagtgagcatttattattcacatccacagccagctgagaattggctaggtaggtcttccaatcttggctggtcttgctcatgtcttgggttggctgatatatgaatggaacaactcatctctgctccatgcatctttcatcgtcattagactatccaagtcaagttcttatgtcaataacagagccacaagagaaggcaagaccaaccaagtatttgtcaagcctctgcttggatcacatttgttaatattccattggctaagttcagaatccaaagttaaggccaaatgctctactcagagggggagggcaatgcaaatatatagcaaaaggcatgcaatagggagaaagtgaataattgaagctacttttgcaatattatctcactagctgacagcaaacagtggaccttgttgatgcatggacaagcttgatatatattggtgtaggcaaaaatggcttgctgccacactgctgcctctgacagaggtggctctaacaattagtggtgaggaaaataatcttcctgatggacagagcttcaaacagtacactttgtcatgatgttgctgaagaagcacatggcctgagttaaatactacagacttttgatcttggtaactggtttggctggtcagggataagaagggagcaatattggaagattagagaaagtgagatttaaggatgaagaatgtggacaaaactatgggaatgtgtccaaagtgtggagatttttgtaggatgaaatgccagaaagaaaacactcacctgaggaggcaaaaattaggtggacaagatgatttctccagtagatgtcagccagccttgtccttgattgccccaggttatacaatgagcccacaaatggagtaatcgtggcagcagagatgccggctatgcttgggcccaacagcttgggcttccacactaatgctcatctagtgatgagctagatgagctaggattcagctactgctgaataccctatttgtcggcagcagagaccaatgatttggtactattccttgaagaggttaaccagtcacttgggagcaatttatttgcattaaattccttccaccctggaagaggagtaattctttcttattgtaattaattactactcttaataggggctttcctttccttccagcagcacctctgccagcattaccctctgatagcctacaggatgtctattaccaacatggtatctcgcattacactgcctcagatcttgggattattttgtagtaaatgactaacaacaggcgcatgaattgttggatccacttgtcttaccgcatacagcatcatccagaagaaatcaatcaaatagaacaatgaaatggtctattataggctcattgtagtcaccatctcagagatgacattctgcaaggttgaagtgctaatctctaggatgtggtaaaagcactacaaaaatggctagcatatgatgccatgtcctcagctgccaggattcacagatccaggaaccaagagaaaagaaataggaatgatccttctccaccattctcagtgacattcttttgtaattgtgcttcccatccctgccgcctcagactttcctggaagtcccagttcccagatggggtagggggaaggaactagcacacttccatgggggagcacagtaaggattccactaagctgaatctactgctgccaatcggtcccttgggactgctcatgtctgtgggacaaaaataggaagtaatatgttaacatgaggagctagggttgtgattacaaaatgaaacaggaagaatgtgtctagaacgcaggtggttcactggggcatgtcgtggtgcttcagtgcctggtaagaaacagcaaacagatgactgtgataatcatagcctaaacagggcaaagcaatcaaagccctagaaaacttaaaggatgaaggtctgggtcactatgcttgacaaccagcctagaccagcggaatttctgatatagagcaggagaaatgtaaaatgggtggtggaagaagatgataagtaccagttttggccttgcgttcagtcatagtgacagtaattgtggcttgtctcactaatcttcatgtgtagattttagaaagactgtggctggccatcaccttgtgttatcccacagacaaaagacaaagtagacttaacatgggactcaatcagttctgaattgactgcatttgggtagactgcagcaaatatctcttttgcacattccctcgtccacttccggtatcagtcacagctacatggatagttctaggtgagtaagcttggacttgtcctttctgcttgtgaaatcccactgcaagccgaagccatgtatctttctgcttcctgttccaagtctttcttcaacactggggtgctgcttttccacacagaagcacagcccagaagtgcagggataattaatgcccctggaggcaactcaactaacgggggatggaaattgcttaattaatgttcccagttttattaggtggaaaattttgggaggcattctgaaagcttctcagagggtcttggagcactcaaaccccaactggcaatcttgataacatacttcttaaattttttattatttttgagagagtctcactctatcacccaggctggagtgcagtggttccatctgggctcactgcaatctccacctcctgggttcaagtgagtctcctgcctcagcctcccagtagctgggagtacaggtgcatgccaccacgcccggctaaattttgtatttttagtagacacagggtttcaccatgttggccaggctggtctcaaactcctgacctcaagtgatccacctacctcagcatcccgaagtgctgggattacaggtatgagctacctcacctggccgataataaacttttaagtggttttctcccttttcctctccctgtttttttacttctgttttctgggatcaccttgtgaatgacctgtatacacccaagtccttttctcaggctctacttgcaggtgaactaaactaaaatgggcacaattagttaaatgcatttatatatttttcacataagtactttaggaattttctagactgtgtgtaaataactatgaataataattatttatttgcaaggtgaggtgagaacattttaatcctgcacacatttttttttgtttaggtaatacaggagttgatggcaacgatggttactcattatgaaccacactgaaacgaccttcaattcaatttccatctgctaataaatatagtcaagtgctgcataatgttttggtcaacatcccctaagattataaaaccatatttgactgcaccttttctacatttagatacacaaataccactgtgttacaactgcctacagtattcagtacagtgacatgctgtgcaggtttgtagcctagaagcaataggtttgtgtaagtacacttgttatgaaatccacaatgtttgtacaataaaaccgcctaatgacgca

SEQ ID NO: 96 - DNA, 1689 bp, Homo sapiens
ctcagctgccttgcacagcctcgcaatgagctgccacaactgctccgacccccaggtcctttgcagctccgggcagctgttcctgcagcccctctgggaccacctgaggagctgggaggccctcctacagtcgcccttcttcccggtcatcttctccatcaccacatacgtgggcttttgcctgcccttcgtggtcctggatatcctgtgctcctgggtgcccgccctgcggcgctacaagatccaccctgacttctcgccatccgcgcagcagctgctaccttgcctggggcagaccctctaccagcatgtgatgtttgtgttccccgtgacgctgctgcattgggcccgcagcccggccctcctgccccacgaagctcccgagctgctcctgctgctgcaccacatcctgttctgcctgctactcttcgacatggagttcttcgtgtggcacctgctgcaccacaaggtgccctggctgtaccgcaccttccacaaggtgcaccaccagaactcgtcctcgttcgcgctggcaacgcagtatatgagcgtctgggaactgttttctttgggcttcttcgacatgatgaacgtcacactgctcgggtgccacccgctcaccaccctgaccttccacgtggtcaacatctggctttccgtggaggaccactccggctacaacttcccttggtccactcacagactggtgcccttcgggtggtacgggggtgtggtgcaccacgacctgcatcactctcactttaactgcaacttcgctccgtactttacacactgggacaaaatactgggaacgctgcggactgcatctgtcccagcgcggtgatgtggctgcggtgggtgcccctaagactcgggactgctgtgcctttcacacttgaatgaagagaaacacctgagctatatatttttttaaagcaactaacttattgctttatgtttatctatgaaaaccatagataaaatctgatgcatttttgtaatctgacaaagtaatttacatactgtttgtgtatcaatacaattttgtgttcttggtattcttagtctagctcacctcaatagccttgaatcctgcatatgaattagacattcatcactggcatatttagaatatctctaaaaggacttgtttgtagaataaggaattttctatgtttcaaagtgttctaaaacctggctaaaagaatgtatttttgtggatggtgttgacttctgactctaaaagcaatcaaacatgtttctgctggacagtgaccaagaattatagtaccttcttatatttttttatagaactgtatatttattttgaaagaaatgttattcgtgctttaaaaaggaaaaaaaaccatgaatcaaataagtattgacttccgtttcactggtattttgactgataaaaaagggaagagggagcgggcataccaagtgtccttctaagcctccatcagcctcaccatggaaagagaggaatctgggtgtagggtgttctgttgggggttgttagagaaaaggaggcaggagaaggggctctgtttgttgtgctctagcaatttcatggaggaaaaacacgctaatattcttaatgcttttcagctgatttctgtataacaggcaaatgataggattactctgtaaagtttcatagaaagattaacgctgagcagtcaa

SEQ ID NO: 97 - DNA, 2491 bp, Homo sapiens
acatacttttacggttacacattcctttacaaacaaccgtgtacatttcagcctcctgccccaccatttcttttctccaggagggaaggctgcatgtcgagatggtcgtagaatgttgagtatcctactttcctacctcgcttttatttgcgcgggtttaaatgcgccttaacagaacccgtgcaaaggcttgcctacttgtctggctgcaccggatgagtagagcatcttccttggtggcaggtgggtgcgaggaggagggggctgggcttttctccggacggtgtttgcccagaagaccatcatccctggactacgttaggaggaagtggcaccgctccgaggtaggggaagaagggttataaaggggggagtccaccacacatggtcttgaagaagcttttataaaaggcaaaggcatctttgccggacgttgttgcaaaggagtagaaacaagcagaggaaaacatcccaaagggtaaccactagcgttcctgcttcttgcaacattcatcccaggcttccagctcagcccgccccgggccaggtgatcggccgccacatcccctgcgactgaagcacctgctccgccatgaacctgccaagagctgagcgccctcgctccacaccgcagcgcagcctccgggactccgatggggaagacggtaaaatcgatgtcctgggagaggaggaagatgaagacgaggtggaagacgaggaggaggaggcgagccagaagttcctagagcagtcgctccagccggggctgcaggtggcccggtggggcggggttgcgcttccccgagagcacatcgagggcggcggcccgagcgacccctcagagtttggcaccgagttcagggcaccgccaaggtctgcggcggcctctgaagatgcccggcagccggcaaagcccccctactcgtacatcgcgctcatcaccatggccatcctgcaaagcccgcacaagcgcctcacgctcagcggcatctgcgccttcattagtggccgcttcccctactaccgccgcaagttccccgcctggcagaacagcatccgccacaacctctcgctgaacgactgcttcgtcaagatcccccgcgagccgggccacccaggcaagggcacctactggagcctggaccccgcctcccaggacatgttcgacaatggcagctttctccggcgtaggaagcgtttcaagcgccaccaactgaccccgggagcccacctgccccaccccttccctctacctgctgcacacgccgccctgcacaacccccgcccaggccctctgcttggggcccctgccctgccgcagccagtcccgggggcctaccccaacaccgcccccgggagacgcccttacgctctgctgcacccgcatcctcctcgctacctactgctctcggcccccgcctatgccggggcaccgaagaaagcagaaggcgcggacctggcgacccccggcacccttcccgtgctgcagccctcacttggtcctcagccttgggaggagggcaagggtctggcgtcgccaccgggaggcggatgcatctctttcagcattgagagtatcatgcaaggggtcaggggagcgggtacaggggctgcgcagagtttgtccccgaccgcgtggagctactgccccctgctccagcgaccgtcaagcctgtcggacaattttgcagcaacagcagcagcatcaggaggaggactgcgccaacggctgcgctcccaccaagggcgcggtgctgggcgggcacctgtcggccgcgtcggcgctgctgcggtatcaggcggtggcagagggctctaggctgacatcgctggctgcccctttgggcggagaggggacctcaccagtttttttagtatcgcccacgcccagttccctggccaagtccgcagggccctcctagagccaggtgggagtggggagcgatccgcagctgctcactccaccttgcgcggcccatactgggcgtgtgcatctgaatcctgctggagagcaaacacgaacttctgttccctgcaaaatggttagaaagaaacagctggattacgttcctctaaaaaccacctgaacgtaaccttcgcagggcgtcaagtcatcttttcttgccttcggctgtggcttctgtggctttccggatttgcacatttcctggggtactatgaacgtgagtggggtattttgttctggcattagaagaaaaacaagcaagcaaacaaaaacacagcctccgatgccaaacatgttcccccttcttcacttccttggaactggaagtgttattcctaagtctagtgcaaaatgcttctactctctgtgtcttcctgatagggatgtttaatgtaagtaggatattaatttcagaacattgatttcttatctgtgtgtctgacgtgccatctttaatgttaaaattaaggtgttaaaattaagcctagttatatagacgaaataaaatgctaagtcactacacta

SEQ ID NO: 98 - DNA, 14712 bp, Homo sapiens
acacccacagttgagctgcgctggccagagatgcctgcccacagcctggtgatgagcagcccggccctcccggccttcctgctctgcagcacgctgctggtcatcaagatgtacgtggtggccatcatcacgggccaagtgaggctgcggaagaaggtatgtgcctccctgggggtccccggcctgggtcatacttgcttctctccacgtcctgtcaggaaagccccgggatagggaaacatggccaaggtgtgtgcagggctgggaggtgagcacctcttccagccccgccggggggcttcctgccagtcccacgtgtcagcaaggcctgcaccttctcctctctggcttaagagcacttactcgcttgccgtgccaccgggctgagttcttggcatggagagagccagcgagtgtctgtgagagaagcaggttctggagggtggagtgtgggagcgtgacagcacaaagcctctgtctaacctggtggcttcccggcacgggaggtctgatatctgggtggagtgggaaccggcaaaacaggagtccgagaaacgtttaagtggaaattcccaactcctggcaaatgtcactaacaagcccactgtagcctccaaaggccagctcccagccgggcaccgtcggggtgctcagcgaggaatttccccactaatccgagcccctgaaccaaaacaacattaacgagtcccagagctgggccggggcaagttccagtagcgtccgtcacactggttggcgagtctgcaaagtcataggctgagcttgtcggctgtcctggcggcagaatgcagaaagaccccaggcacctgttacttcctccccaggtattttaataaagcaatcatttcctgaaactgtctctgtcttcccctgtgtccagttcaaaggcgaggtgaggcaaggctggctctggcactgcatgcgggtggatcctggggagtgaggatcttggccacaagccaggctcaggccctgctgcaggtacaggcaggattaaaggcagggcagctgcccaagtgataggatgcccggaggctacagcacactgatagcttctgacttctccctgccttggctggtcctgggatatgggatccgggcatcaagtagaacagctgcattcactcattgaatccttcccagaggaccgaatgtggcccggagctgagcatgagatccccgccacagccctgagggcaggggaggcgccatagtcatcctgttttctaggtgaggaacctgggctcagagaggagacatcacttatgaaggtcacacagcccggtttgaactccagtgtccagcttcagagcccacatcctgtcttggaggcgggggtttctgttttgttttttttttctgctgtccaggctggagtgcagcggcatgatctctgcttactgcaacctccacctcctgggttcaagcaattctactgcctcagcctccccggtagctggcattacagacacacaccaccatgccctgctaatttttgtatttttagtagagatggggtttcaccatgttggccaggctggtcttgaacccctgacctcaggtgatccacccgcctcagcctcccaaagtgttggaattacaggcgtgagccaccgcacctggctgaggcctgggttcttaccagcaggccagcgattccttttttttttttttttttaattattatttatttattttagagacagggtcttgctctgtggcccaggctggagtgcaattgtgcgatcatagctcactgtagcctcgacttcctgggctcaggtgatcctcccacttcagcctcccaagtagctgggactataggtgtgcgtcactgctcctaattttttatgtttttggtagagatggcttttgccatgttgcccaggctggtctcaaactcctgggctcaagtgatcctcccatcttggcctcctggagttctgggattacaggtgtgagccactgtgcccagctgtgatttccttttaacacgaattcggggaagggaggaggtgaacctgtcccagagcctttctgcctgattggcagggacaccgcagaaggaaacccccactccttgggctgctcctgaggtgttcctcatgacaacgtggccccctcttatctctgctctgggcgctaagtatcatccaggaaggacttgctggaggtgacagtcacaggccctggctcctccacccaccagcctggggacctggaaaagtctgggagctcagtgtcctcacctgtaaacgggggtcgtgacagcagcgccaggagaatgcaacgccccaccaatgtttgtccttaagacttataagtaactgaaattaacatgagcatcgcagcctcaggtcactttcaagggacctcaaccaaaggctggcctccaccccagctaaggtggcacctcggccgctgacactgggggcttcctggcctgcactgcagctggctctggcctggctgacttgtatctgagttgtatctccagggggagcaactccatgggcagtggactcctaaaggcagtgcccactgtatgctgaggccccttgaaacgtatcacagatccacggacagagccttcggtgttggtgattcactgatttcagggccagcagagaggaattttgggtgtgaaggttccaatctcgaagatctgagctgcattctcctctggggtagggcagggcaggcccaccagggaggacaaaccagcccttgggggacagtcatgagtcagaagcacaggatttgccgtcagctgaacaatttagaaaacctgctcctgagattcaggctctgctgtgggcctggtggggtctgactgtctggatgccagcagggaacagtggagcaagagtcatgggcctctgatgatctcagtgtgactttatgtctctgctttccaatgagagaaagtgacaattcactgagcacctccttgtgctgggcattgtcctagcggcttctccaggtctccctctcactcgtcacacagcacatgagctgtgatttctcctgagttttcagagttcaggatcctgtggttaatcagcgcggagctgggttttcagcctggggctctcaagaccttctcatggcttttagtgcaaagtccaaattcttcaggtgctgccaggacccctgatgacccctgtccctttatcttgggcccctgtcccttgccctctgtgctcccgtgtgctggttttctgttcttcacacatgcccagcttcttccagcctcagggcctttgcacgtgctgtcccttctgccttgaatgttgttgctccagccctcccttcatctggttaatgtcaatgcatctttcaagcctcagattgtttgttttattttttttggagacagagtctggctctgttgcccaggctggagtgcagtggcaagatcacggctcattgtagcctcgacctcccaggctcaagcaatcctcctgcctcagccctcctgccaagtagctgggaccacaggtgtgtatcaccacacacagctaatttttgtattttttatagagggggtttcatcatgttgcccaggctggtcttgaactcctgagctcaagtgatccaactgcctcggcctcccaaagtgctgagattacagacatcagccactgtacccagcttgtttgtttgttttagagatggggtcttgctatgttgcccgggttggtctcaaactcctggaagctcaagcaatcctcctatcttggcttcccaaagtgcttggctcacaggcgtgagccaccacacctggcttgttttagagatggggtcttgctatgttgcccaggctggttttgaactcctgggctcaagcaatccccctgccttggccttccgaagtgctgggattactggtgtgagccacctcatccagccctaagcctcagctttcatgtcactgcctcagagaaactttctcagagcctcagactgggtcaggtcccacgtaaacattctcaaggccagccgtgccttcttcttaacaggtgagacaccctggccttccctggttcataggcaactcccccatcggactgtgagcttcataaaagcagagacaggggggccttttcatggtgagctaccagcccctggcacagggtaggaatcgtggatgatggttggatgggtgtgtgtgcaactgcacctctgtcctgccactgtgaactctggtcatggacaaaacatagccccaggtgactgggccgtttgtctcacgaggagtgactctcaactggtatatttcaggcctttgccaaccccgaggatgccctgagacacggaggcccccagtattgcaggagcgaccccgacgtggaacgctgcctcaggcaagtacttcgggcccctggcctggccacacctggccatggcctgccctttcagaacttcttctgcacacaggggacttggaggactcccaggggctgaggttttctgtgttcctgatcttctctgactgttttactttattcaatgatttaatttcaaatgaactttggaaaagtaagacgtggtcatgactcataattacaaagtgagaaaggtggtgacttcagtgaacattcagtctccctcctacctctgacctccaggcactacgcagttctactggccaggggcaaacactcctgccaatggccatgcatcttcccacagagatttgctgcatttacaaacatgtgtgccacgcttttcccgttctgccccatagaatcaccctttatcctctggtctgtactatgcttttttttttttttttttttttttaatatggcaacagagtttgttccatatcggctcacagaggagttgcattcactgtattggtgctccagtatttatgttgccactctgttgaatgtacagcccataacttccctaaccaattcccctgcgatgggcatttgggctccttctgtgttatgaacagaaggcctcaatacctctttttttttttttttttttttttttttgagacagagtctcactctgttgcccaggctggagtgcagtggtgccaccttggctcactgcaacctccgccacccgagttcaagcgattctcctgcctcagcctcccaagtagctggggctacaggcgtgcaccatcatgcctggctaatttttgtatttttagtagagatggggtttcactatgttggccaggctggtctggaactcctgacctcagatgatctgtccgcctcggcctcccaaactgctaggattacaggcatgagccaccgcacccggcctcaacacttttttcatttgcctttatgggtatgtgtgagtaaaaccgcaggatgcaacaaaatcatgtcccactactggtgtgggagccatttttccatccctctgacaatgcaactgacaactcattgtattggcatatttgggtggattcctaccaaggtgataggtgaaaatttatatcacatttttgttttgctttgcacttctttattcttagtgaagttgaacatcttttcatatgcttaacatccccctggtcaattaaaatgaatttcctcattataaaaatcagaactcattacagacgatttgggtaatactgaaaaaacacagagacagaaaggaaaaccactcacagttctaatcacagttcacacttgcatctctctcctctttgtcttctatagctaaatattttccataaaattaggcatgcattaggtacacccaatttggagttctgattttcttttattaacattattttgcgaacactttccatgttggtaaatgttactaaaaaaattattcttgaccagatgtggtggctcatgcctataatcccaacattttcgagggccggcagatcacttgaggtcaggcctggccaacatggcgagaccctgtctccactaaagatacaaaaattagccgggcatggtggcacgggcccgtagtcccagctactcgggaggctgaggcgggagaatggcatgaacccaggaggcggaggttgcagtaagccaagattgcgccactgcgctccagcttgggggatagagtgagactccatctcaaaaaaaacaaaagatccttaaaaaactggcttcgtaaaatcccatcagagactaaatgctaatttcacataatcacagtcaatattaaatttttttggcagtttctgctctgccatcttttaccagttagctggagagtgaggcgatggcactccaggggttggggtcatcggaagagcttgaaggggaagtggggaggacggagagctggacaggctgaggccggagacaaactgtctcatgggtctcaacacattcccctgcatcacaggcggaaatgggtgggacactgtcatttaaataatacaaatttctttcacttgaaagaaagtctgtgggtttttttcttatgtttttcttggccattgacaataatatgtccacttgtggttttaaaaaaattacagacctgtgtcatgtaggaagtgaaattccttgctattttaccctttcaaatccttcatatgaggcccgtctctccattaatgagcccttactacatcccagacactgtgctaagcactggctgtactttcaagaacaaaagccttctccatacatgacttccattggtgactcttgtccccagctgtggcggccctcctggacagtggagaaggatgggatgagctgtccaggcagcaggaggccaggacggtgggttgcccggggccagctcacagcagccaccaagaggatgcgttttggctcctcccaggctgcagaggttttatgtagcaaagctttcatgtggcacaatgtggcacaggagtggccaagtggccttacagatacttggtttatttttactggctgaaaccatgccccatggagagacgatagacccgggtggcgccgagacatttccacccaaccaatctttttttttttttttgagacagagtttcgctcttgtcccccaggctgaaatgcaatggcacgatctcggctctctgcaacctctgcctcccgggttcgagcaattcccctgcctcagcctcccgagtagctgggattacaggcacctgtgaccacgccagctaatttttgtattttttttttagtagagacagagtttcaccatgttggccaggctggtctcaaactcctgacctcaggtgatccacctgcctcgggcttccaaagtgctgggattacaggcgtgagccattgcgcccagcccaaaataacccctcatctacagtactggggtttaaatggtagaaattcatttcagcactttctgagtgcgtcttatctaataatactttatagccatttggtgaggacttactggaagccgactgtatactgggcccaagtcagacctggggagtgcctgggtcccctgggcccctcctctgccacctgatttcacagaacctcatggaaacttgagtgtgcagaactaagagaattctatatcctgccgtctgctaccggagaactggctggaacccgaagggggagaccacctggaagcaaaagttggttaaatattagaccagggtttatggtatgattcgagtcacccttctgtcaaataggaaagcacttcagtcttggttcttggagcatgaatctgccttgcaggttagcacatgctgcagtccaaatgtgagcctagttctgggagaagccagggactagccaccttttcaggatacctatccggagttcccggcaatgtgcgtctgggccagaatctgaggttgggtgtgtggaactgcacggaggggttacctgtgtggtcccaaagaagagaggcaaacgtgcgacctaagcttggagcatttctgtttggagtgtatagacttaaactgagtgaactgatttgtcaggaaattgggtcccaaaatgtcagccctagaagtcccttagatgtcatccagcatgtacattttgtacatagtgaacgcagtcccagagagtgagagagatttgcctgaggccatggagctaataagcaccacagcagaactggaggtttccagcctaatactcccttccggctgcaccacgaagtactcaaaaaaaattttttttttttttgagatggactttcactcttgttgcccaggctggagtgcaatagcgtggtttcggcttgctgcaacctccgcctcccgggttcaagtgattcttctgcttcagcctcctgagtagctgggattacaggtgcgcgccaccactcctggctaatgtttgtatttttagtagatgcaggatttcaccatgttggctaggctggtcttgaactcctgacctcaagtgatccgcctgcctcggcctccccaaagtgttgggattacaggcatgagccacctcgcccggtcttttttttttttttttttttttgtgacagggtcttgctctgtcgcccaggctggagtgcagtggaatcccggctcactgatgccttgacctcctgggctcaaacgatcttctcacctcagcctcctgagtagctgggaccacagacacgtgccaccatgcctggctaatttttaaatttttattgttgtagagacgggatcttgctatgttgctcaggctgattccagcacccaagtgatcctcccacttcagcctgagatcacaggtgtgtgccaccacacccagccccataacgtgcttttgattcatttggccggagcatctgagggcagtcagaaagtctggcaaagccaagagggtgaagtgagctttagcgatggtgtccaggacagggctggtgatggcgatggaggagatggcggcttgcttaaaatctccctactcagtcaagcacagtggctcacatctgtaatccctgcactttgggaggctgaggcgggtagatcacctgagcttaggagtttgagacgagcctggccaacatggcaaaaccctgtctctactaaaaatacaaaaattaaccaggcgtggtggggctcgcctgtagtctcagctactcaggaggctgaagcacgaaaatcacttgaacccaggaggtggaggttgcagtgagccgagatcacgccactgcactccagcctggggcacagagcgagactctgtctcaaaaaaaagatcttcctactcagtgtccaggagtgttgtaagcactttccaggaattcactcacttggcactctgaggaggggcctggcactctcggctctgctcctgaggctgtccctctatgggaaggcgatttcactgtcttgtatacctgcctttgaaacgaagcaggcactgcattgcgtcaaccctgatacaaagtcaaggaaattggccccaccgtggatgccagcagggctgggggagagaagaggagaccctgtggagcggccagcagctgtccctgtcctggccatctggggatcactgtcctcaccgctgtcacctatgcaggaaaatgcagctggtgtggaaaagtctgtggagggtgaaggcaggcctgatgctgcaggaggcaatacaagtccagtctagtaggaatttgctttgggtggcttttaccttaaaaaaatggttattatttgaatgatgcatttcacccgagcacgtctgtggtacgtgcctgcctccatgtctctcggtttggagcctggaggtgggaggagggaggtgagctttcttccatcattccttggtgtctccattgctccctgtccctggccactgcggcctcggaggggcccctctgcggtttgagacagaccagacgagtgagggagggctgggccagccccaggggctgacagtcagagctcctgaccacctctcctcccacgctggtgaccgctgaattgctgcccaatggctggaaatagaaggtggggctcagtccccgctttttctgcaaggcctgctcctccccagcctgcagacatgccaggcagagcaggatccacgtctgccatgaacttcccgtcttgttcctccttcccaccctgtgttccccaacttctttccttcacccactcttcagggtttggctatgtttgtgaactatctgtactatgattctcttaacagctttccaaacattgacttactctttttttttttttgagacggagtctcactctgttgcccaggctggagtgcagtggcgcgatgttggctcactgcaacctctgtctcccgggttcaagagattcccctgcctcagcctcccgagtagctgggactacaggcgcctgccaccacgcctgactgatttttgtatttttagtagagatggggtttcaccatatcagccaggatggtctcgatctcctgacctcgtgatccgcccgcctcagcctcccaaaggacttactcttaaaatatcaacacatactttaaggaatagctgagtgaacgagttgcatatgctggttgtgcttttcctgaaactttcaaataaacattacaaaactcctcatccaggtggcactcccttgtgaatcacttgtgacaggcagacctcattttgggacataatcaaaaatgggttttccaagggtgtccctctaatcagcctgtagggggatgtgggtacccacagctcaattgccagaggacggagtgatttttgttttgttttatgttttttttttttttttttttttgagacagagtctcactcactctgtcgcccaggctggagtgaagtgacacgatcttggctcactgcaacctccacctcccaggtttaagtgattccctgcctcagcctcctgagtagctgggaactacaagcacacaccaccatgtacagctaattttttttttttgtacttttagtagagatgggattttgccatgttggccaggtaggtctcaaactcctgtcctcaagtgatccaccagcctcagcctcccaaaatgctgggattacaggcatgagccactgcacccggccaaggatggagtgattttggaggaacacctattgcctttcctcatcagtcctggtaagggacttacttgacagggaggtggccccagtctttggtttctccctctcttttattttatttatttatttttttgagagggagtttccctctttttgcccaggctggagtacaatggcatgatctcagctcactgcaatctccacctgcccggttcaggtgattctcctgcctcagcctcccgagtagctgggattacaggcatgcaccaccatggctggctaattttgtatttttagtagagacagggtttcaccatgttggccaggctggtctcgaactcctgacctcaggtaatccgcccgccttggcctcccaaagtgctgggattacaggcgtgagtctgtaatctccctcttatgtcttccctgagggcagtaccccaggatctatccagagccagcctctgacagacacaggcaggccacagtgttccccaccgctgggtgagaactgccctgccacagacttgctttccttgtgtctgggttgcaaggtcaggatctgggggaaaaggagaagaggggttcatgtcagtctcgggatatgcggacccagatgccaggtgctgtgtcctgagtttggcctgagaaagatctaggccctgctgggtttacaggagttttgtacactcagattgaattcctctccctctcttatctgcctcactccctcttgtgcaccgcactgtagccatgggctcacctttctgcacattgaacatgctgtgcttattgtgacctcaggacctttgcacacactggtcttccttcctggaatgcttttcccctgcagggccagcttctcatcattcaggcttctgcacatatgtctccttccctgcccacccccaccccaggcacgctgcagagcttcctacagtgtggggtggccaagcactccaggccccctctttccttttggtcaggcccacacaccatcgcactggcccaagaatcgtcttgccagtgagagggaagaggaggaccctgcagcgggtccccactcagtgctgctagtctgggcctggcccgaggagacggtgttattggtggaatgtatgtcagcaggaaggcccggagaacatgcttctgttcctgcacctcacacgcgtggcctgtccttgggggaggtcatgccctgggcactgaattcctgtttatttgagcttccaatgtggcaatctatgggtttagttgctcattcagtctctaatttatgggactcaacctccccacccttcataaaggaagccggccattagtaggagtctggaaaatgtgaaccagcagaagtaggtgagttttctgagttttctttcttggtcatttatttatggtggggttatacagagcccctccgcccccaccacacatatgcacatgcttgattcctttcaacagaaaaagaggcaggaaaggatgtgtaaaatgaagagcttcaccgggggctggccatcggttggctccagtgagtgggagcggatcttgttatgattgtccctgaaaggacaggtggtagttagatttagggggaaaaggagacagagcccggcattcatttcaaaggcctgctcttgggctctagccccttctactcgggaggggcccaggaagctgcattcagaaggaggatgacctcaggcctgactcagagaagccctgccctggaggtaaagagcacaaactccagtcagaactcggttccaatcccagctcctccactcgttggctctgtaaagcactcagcacctctgagtcccacttttcctgcctggtatccaagggctagagaggaaggtgggggagagtatggcaggagtggggtcccggcaagccatagaggtatggtaagagcatcctggaccagtagccctctgactcccagcccatgacgtggcctcgctgcctcagctgcttgcaagcataagcttggagctgccttcttctggactctggggtatccatctccttgacctggctgtgaatggatttgagtgtgtgatatgcctgaaatgacccccagtgggtcaaagcacccccagcttccatgacactctcaaaagggcctatggccccaaagctaatacctggctgaccgcacccctcttgtctccccagggcccaccggaacgacatggagaccatctaccccttccttttcctgggcttcgtctactcctttctgggtcctaacccttttgtcgcctggatgcacttcctggtcttcctcgtgggccgtgtggcacacaccgtggcctacctggggaagctgcgggcacccatccgctccgtgacctacaccctggcccagctcccctgcgcctccatggctctgcagatcctctgggaagcggcccgccacctgtgaccagcagctgatgcctccttggccaccagaccatgggccaagagccgccgtggctatacctggggacttgatgttccttccagattgtggtgggccctgagtcctggtttcctggcagcctgctgcgcgtgtgggtctctgggcacagtgggcctgtgtgtgtgcccgtgtgtgtgtatgtgtgtgtgtatgtttcttagccccttggattcctgcacgaagtggctgatgggaaccatttcaagacagattgtgaagattgatagaaaatccttcagctaaagtaacagagcatcaaaaacatcactccctctccctccctaacagtgaaaagagagaagggagactctatttaagattcccaaacctaatgatcatctgaatcccgggctaagaatgcagacttttcagactgaccccagaaattctggcccagccaatctagaggcaagcctggccatctgtatttttttttttccaagacagagtcttgctctgttgcccaagctggagtgaagtggtacaatctggctcactgcagcctccgcctcccgggttcaagcgattctcccgcctcagcctcctgagtagctgggattacaggcgcgtatcaccatacccagctaatttttgtatttttagtagagacgggttcaccatgttgcccaggagggtctcgaactcctggcctcaagtgatccaccggcctcggcctcccaaagtgctgggatgacaggcatgaatcactgtgctcagccaccatctggagttttaaaaggctcccatgtgagtccctgtgatggccaggccaggggacccctgccagttctctgtggaagcaaggctggggtcttgggttcctgtatggtggaagctgggtgagccaaggacagggctggctcctctgcccccgctgacgcttcccttgccgttggctttggatgtctttgctgcagtcttctctctggctcaggtgtgggtgggaggggcccacaggaagctcagccttctcctcccaaggtttgagtccctccaaagggcagtgggtggaggaccgggagctttgggtgaccagccactcaaaggaactttctggtcccttcagtatcttcaaggtttggaaactgcaaatgtccccttgatggggaatccgtgtgtgtgtgtgtgtgtgtgtgtgtgtgtgtgtgtgtgtgtgtgtgttttctcctagacccgtgacctgagatgtgtgatttttagtcattaaatggaagtgtctgccagctgggcccagcacctcg

SEQ ID NO: 99 - DNA, 9421 bp, Homo sapiens
tggcagacagggacccgcagctcagctacagcacagatcaggtgaggagcacaccaaggagtgatttttaaaacttactctgttttctctttcccaacaagattatcatttcctttaaaaaaaatagttatcctggggcatacagccataccattctgaaggtgtcttatctcctctgatctagagaggtaagcagggtcgggcctggtagtacttggatgggagaacacctgggaataccaggtgctaaaggctttaagaataaaaaataatgatcctgctttgtgtttatcccatgttgagttctgtgcggggcagagggaacacacggtaaatgcgttatggggaattataggctacttgagggagtgacagtctggtggtaactcctgccttcctccatcagtgccacattggcatcctcttatgcagtcaggcttcagggctgatgggttcagaaccgagggcttctggctctgagtgaggtcctgctgcaaggtttcctagatgagccactgagactctaataagatccagtggaaataaccaggctctcgtcggaatataagtcccaagggaagctgtgccagtcttgtgggcgactgcctgacttctcctttcatttcagcaccatgaagcttctcacgggcctggttttctgctccttggtcctgagtgtcagcagccgaagcttcttttcgttccttggcgaggcttttgatggtaaggcttcagaaggtttgcaggatttctgaagagaaacatcgccctggacctgataaactggggaaaatgatgctttcggaaggctgcttttgaaccacagagttgctagtgtctgcgttgctgaggcctgccaggaactagggtttgctgggttgcctgtctcgagtctttcagagctgctgggaatatcccctttccccgtagtgcagcttctcaggatgtgttaagtggatggatcacatttcagaagccgctgcaaggtgtatcaaaaacacatctcctgagccgtaagggacggggcatccagtaacaacgcacacggggtatttttgggcttccttaagatttgagccgctgccttaggttgtgctgcccaatgtgcctggggagctgctaaacagattagagagtcgaggattgttgtcagttactcagagaaagaacaatcatcctttccaggagcacctgagctgtttgttttgagtagaagatgcaaaataaggcctgcaattggtataaaatgtccctcagcataaatcgcataggagtatgactaaggctgttgactcttctgtcttctttctccttcctccttcgatttcctagttggataatgtacagggctctttagcctcgctctgtcaggggctcccttcctggtttgttctgtttccattcttccttctccagccttcttgacaagagctgggaactaacgtgcctcaagcccccacaaggaccacagcattttctcatctagtttcagaatgactctgtgaggcaggcatcccttctgtgaaggtgagaaagctgagacttagagcagctgaggccaatgcccagggacttactgccagtcagcaggtggcagggcagaggtttgagcccggctgtgcttgaggtcagggctcttgccaggtagacgcatcactgaccacctcccagaggttgatggttatgaatctcagacacaccttggcatcacctgaactacccatgccttcaactccccagcagagtctgcagaaactggcctggggtgtggcctgggcactgggactttcagtttctctctgggtgattagaaagtgcagccaaggctcacgcctgtaattccagcactttgggaggccaaggtggatgaatcacttgaggtcatgagttccggagcagcctggccaacatggtgaaaccctgtgtctactaaaaatatgaaaatgtagccaggcgtggtggcaggcacctgtaatcccagctactcaggaggctgaagcaggaaaatcacttgaacccgggaagcggaagttgtagtgagttacattgctccagtgtgctccagcctgggtgacagagtgagactccgtctaaaaaaataaaaaagaaaaagaaagtgcaaccacggcggagaaccgctgctctattgcttcctcaagcaacccacagtatcagtacagcctactgagaaagtgtttagggacttttatgctcctaacagtcactggaactcaggtcacaatgacatgtattccatttgcaagaatatatactttagtagtcagggcagaagtactctgtgtctgccacctttctcagcatcagtattccatgtcaccacctcattcatatacactcctggatcttatcataggcagcttcattctatagcagtggctcttcaccagggcacttgaagaagccaactaggataaaggaatgtgcttctcaacccatggtatccaaggctgctatgatcacaggctgaaagcttgaagtcagtggaagatttgtccttctttcattcccctctaaggtgttgttggagtctttatgttctcctgatgtcccttctgcctttcctttcctttccaggggctcgggacatgtggagagcctactctgacatgagagaagccaattacatcggctcagacaaatacttccatgctcgggggaactatgatgctgccaaaaggggacctgggggtgcctgggctgcagaagtgatcaggtaactggagctcctgggacgttagggctgggtgagcagagcttgcctgccttggacagtcaggagggagacgagctccttgtggagaagttagaggctgtggtccctcctcttcttgccctctctctgcctctgtgctcagtgtgagggtctgagtggatggtaggagtgagtgattcctccccctccccctctgggtgctgttcatccagcctaggggtgcccagcctgtctgaatggggcagtgcccaggcagggtcagtgttttcactcctccttccttggcctttctgggctcctctctgagccctcccttggaacggggagaatgggagggtgagctgttgctcactggcctgatgattaatctccttcttgcctgcctggactacagcaatgccagagagaatatccagagactcacaggccgtggtgcggaggactcgctggccgatcaggctgccaataaatggggcaggagtggcagagaccccaatcacttccgacctgctggcctgcctgagaaatactgagcttcctcttcactctgctctcaggagacctggctatgaggccctcggggcagggatacaaagttagtgaggtctatgtccagagaagctgagatatggcatataataggcatctaataaatgcttaagaggtggaatttgttgaaacagtgtgttcttcttttggtgctgactgcctgtttggtacaaaagggaaatcaatgcacacccacatgaagggtgagcctaggtaggcctatgtgtttggatgtgaggagacattcttagtagtcacagtgcagacacctgcatcaacccttccacaaattagacctccttttttccagacctttgtggttacattgttgctatttccagtcccttccttgcccaggcttctcatctcctgtgaattatttcctgttaccttctctgtccctcagttcttcattcctcagtgatctctgtttctggaggcaggggctacagacaattgaattgtgaagtcctgcctcagcgactgccacccgagtcttcctttcatttctcagcaacacctacaaatccaggcattaatgaatttctacccactccatctaaaaaatacctccaatgcagttctcttccactctattttcattgccttctttcaagtctaaatatgtaatgcgactccttttatgaatgttttctgagtttctggagcttaactagatcaaagttgtggaagtggtggcagtggagagagagccagatagagaagaactgttttatcagtcagggtccctttgggagacagaaaccaggcagtaatttgaaaagggaaattttaatataaagaattattaactgagagcagcattaacttctaagagtacagaatatgagaaggtataaatttgagattgggcccctcacaagactgacattggatggcaaatagtttactgggtccttcaagccaaaactgacatataagaactccattgaggtattaatgaaacttggcaggaagctacccagggtgtaacttaactctgggaatgcagctagggttcctgtgacaaatttgggaaactgcttgggggcaggagataggttatcaaaacccctgggaagccagctgtggaagtggcagtgctctggagtgaactgtatcttgccaaaatgtatatgttgaaaccccaactcacagcatggctgtactattttgttacagcagcccaagctgattaaaataagtgggctgctggtaaacatcatggacatcctactgaggtgccacagaaattgtcaggaaactgtcttggccttgggatgccactcagatctctggggcaagtgccactggttgtcctgtacaggagaagagtactgcaggagctgaaaggaagcaaagcacaaaagaacaggaaaagatgtcttcatctcctgcttggccctctagcgccctctatgggtgaagattaacatcatgcccaactggcaaaggagaaatgttcacagggtccagctccagcatcacaaataggacaaaggggtgggtgtggagctgaaaataaagaaactgataactggcataccccttttctctgaaaaaggattgaggaggactcctaaggtgagaagactagttataaaattatatttacagagtaaagacaaatttatttgtcaaggaggaagaaaatgtatggatataaagtagaactatttacaacagaactttctcatacagttctcatcaaaagacactaatagaagtgtaggtataggaggtataggaggtttgagtctgagtctcaaagatgtgccaatgccaaaacaaggcaagggcaagataaataagatggagagaggcgtggaagattggctcatgggagcagactcaatgcactgttgagattagtgttcagtctagtaaagtctgagttgaccccaagttgtaaaaaaagactgtaatgctattattacaatagcaattgtaaatgcttacaattagatttctgtcacaagtactgaagttgtagattttggggggcaggagggagagaaagggaggatgagagaaagaatggctttcaaagtcaaataaagcaagctttcaaagtctagtctttgtagatattcaaaactttgcaatcaacatattattactagaaataattaactgaagcaacatttggatacagaaattcattcatccgtctgtaaaggaccaaatcactccccttcttgaaatctataatttgaaaaaaaatttaattcaatatagtccataggttcagaggaagaaaaagtataaaaaaaacaagaaaaaaatttttaaatcgaaatttgtatccaaggaaaaaggtgcttggtttacccaggaatttataatttgtaaagtcacacctaatacctatgctctggcacacccaaataccttttattaattacttggttttcctcagtaagaattaacatgcttctctctgttagaaaagtttgagaaagggaaattgcattgctctttgttatagttgtgttttgttttgtttcgttatttgagacagcatctccctctttcatccaggctgaagtgccatggcatgatcatggctcactgcaacctcgacctcccggggctcaagagatcctcccacttcagcctcttgaataactgggactgcagatgtgcgccatgacacttgcctaatttttatattttttgtagagatggggtttcgccgtgtcacccaggctggtcttgaactcctgggctcaagtgatctgcctgcctcagcctcccaaagtgctgggattacaggcatgagtcactgagcccagcctactgttatatttatttttgtgtcggtttgaggctgcccagattcacattgtttctggggtcgtctgtgagggtgtttccagaggagattaacatttgaattggacttaataaagtagattgctattctcaatgcaactgggcatcacccaatctgttgaaggcttgaatagaacaaaaatagaggaaggacagatttgcctcccttttcccctgcctcactgcttgagttggacatctcctctcatcttctcttgccctcaaattggatttacgtgatcagttgctctggttctcaggcctttgaactcagactgaattacactttcctgagtttctagcttgcagagggcagatcgtgggacttctcagccccaattatcttgtgagccaattccttacaataaataaatacatacatacatacacaaataaattatttgtcctgtgtctctcaagaaccctgactaatagggtatccaagcttttcagtcttatctcctatgactaattaatgtgcctcatgctacatgcaaattgagctgcttgttatttttaaacatgtcattgaattaggaattatttcaaacgttcagaaatgtgcttccatgtgttcattcagcatttattattgttatttaaaatattcattcatttatttatttatagatttagggggtacaagtacagatttgttacactgatagattgcataatggtgaaatctgggttcttagtgtaaccatcacccaagtagagttcattgtacctgtcaggtaatttctcaatcctcggcccccttctgccctccatctttctgagtctccagtgtccattattccactttctatgtccatgtgtacacattatttagctcccatttataagtgcgaaaatgtgatatttgactttctgggttatttcacttaagataatggcctctagttctatctatgttgcagcaaaagatacgatttcattctttttaatggctgaatagtattctatggtgtatatatgtgtatacagacatacacacacacccctccaatcattcgttgattaacctaagacacttaggttaatcccatatttttgctactgtgaataatagtgttgtgataaatacatgcattcaggtatattttttatataatgatctattttcctttgggtagtacccagtaatgggactgctgggtcaaatggtagctctatttttagttctctgggaaatctccatactgctttccacagaggctgtactaattgacattcccatgagcagtgtataagcattcccttttctccacatcctcaccaacatctgttgtttttttgacattttagtaatagccattctgattgtgtgagatggtatctcattgtggttttaatttgtgattaaatttgtgtttaaatttgtgactctgatgattagtgatgttgagcatttgttcatattttgttggccatttgtatgttttcttttgaaaaatacctgttcatgtcctttgcccgctttttaatggggttatttccttttttcttgttgtctgagttccttgtagaatcttggtacttgtcctttgtcagatgagtagtttgcaaatattttctcccgttcttaggttgtctgtttactctgttggctatttcttttgttgtgcagaagtttttagtttagtttagtcctgcttgtgtatatatttttttgctgcatttgcttttgagatcttagtcataaattctttgactaggtcaatgtttggtagaattttcctaggttttcttttagaattttttgtttcaggtcttacatttaagttgttaatccaccttgagtatatatatatatgatgagagatataaaatttcattcttctgcatatggctatccacttttatcagcaccgtttattgaataaggtatcatttccccactgtatgtttttgttgactttgtcaaagatcagttggttatatgtatggggttttatttttgggttctctattttgttccattggtctacgtgtctatttttataccagtaccatcaacatttattaaataagtagctatgtgactaaaggaacccagggaatgtcaccccaaaatacagtaccctggtaggctgattattttaaaggcctttgaaaggcagcagatgctggaagaggctattctctgctcttcttttatctgccttatggctgcatcccatgaaagagaaaacaatagccttccacctgctccatgaaatctcattatttcagagaagatgactgaggaatacaaccacaactggatggactttttcaaaagatgacacctgcttatttgcctcattcaaatttcaagagaatcatttacaggttaatttctattccccaggtccactcattcttcctaataatcatttatgacttcaaaaaatttgtgtacattccccatcttctcctcccctatgaagaatagtatataatcaccggtaccccattgggttattgggaaatcaccctcctgtgattttcccccttgcatgttaaaatacgtgtatatgactttttctcctattaatctgcctttgtcagtttattttcagctgaactgtagagagtgaaggaagaagccttttttcttcactcctacatgacccaggcattgatccaggcaatgaagattcagtgtaaataaccaccactaacaagaccatggcctttggaacctgtgctaagaggcatggatgagctccctcagcatgtggatggagactgaagagaggtctgaaggctcagtgtggtgtctccattctctaagaagtttggaggagaagctggatacagcaaaacagactgagaaggagcagctgttgggaaaggaggaaaactaggaaagcatggtgttccagaatccctgatggagatattgattagtagtatcagattctgcttagcagttgaggagttcacctttggcttaagcaacatggagtcattgactatctcgtgaaggtggttgcaggagaaggtctggagaactaaatggagcagtgataagagagaatgggagatggtatgataggactcctggacaccccagacatcaatcaaaacaccacagacaagaaggtgtggatacaaaaactagcagttagaagaaataatagaaaatgaactccaactacttctgaaaaaaaagtaatgagggcaattaatacattgaagaaagcctcaataagtacaacagtgtagtactgacttatatatagaaaaaacctgatcagtggaaccaaatcctcagaattagacataagtgcatatgagaattttgtatgtgat

SEQ ID NO: 100 - DNA, 66852 bp, Homo sapiens
gcccggacgcagtgaggggggtcggcgcgcgtgtctacgcggacgcaccggctaagctgcttctgccgccgccggccgcctgggaccttgcggtgaggctgcgcggggccgaggccgcctccgagcgccaggtgagggcggggacgccaagggccgcgggatgggcagcggcggaggagccccgcaccccaggctggggcagtgggtgggggcggggacagccctgcgccgaggaccgggcgccgctcccgggcaccggcacacgcccggacggctgggtggaggctgcacctggccgtggtgccgcgctggcgaggggagaggtcaaggcgcggcctgtccgcctggagggtgcgggatgctagagccgcagaagggtgcccagagcgtgggtcgccgcgccgaaggctgagccaggctcccggattccccgcgcggacacggacgcagaacgcagacagtaggtggccaatccgaggggcggctcttggggcggctctatggggctctggggtctggactttgcttttcaggagctgcgtccccgggcccccgccggtccatctcccctctgaaggtacatgtacccaatcttccggctgagcgaatctccaacctggcttgcccacgaggatggctttctggctatttttggtccttaatgaccaagttaggtggtcgggttcaggctgccccctcttggtgggtgagggcagtgggacaaagtcgccatccgagcagtttcatcatctgatcctgaggtccagttgagccgggaaaatttcgtcagctctggactaggggttcacttttgaggatctggtgcttgccagggcctgggttccagagacaggcttctctaaacagttaaagggctcggctgtacaggaggactccggacacaattggggagtggctaagtgctctcttgtggcccgaatggaagcgtggggttaggagcagctttgacctgacccttcttcctggagcaagcctggtttgggtttacgtctttagtggctctcccctaggagccccaggccattgggacggctgtgctcctgctgaggagtggcctgggagttagccctggcctctgtccctgctctgctcttaactggccctgtgaccttgggagggtcaggtcagtaccacggtcagactagatctccttaaccacagcatatacaattccgtaatccttccctcttttattttattttattttattttattttattttattttattttattttattgtattttattttatttgagacggagtctcactctgttgcccacgcaagagtgcagtggcgcgatctcggctcactgcaacctccgcctcccgggttcaagcgactctcctgcctcagcctcccgagtagctgggactacaggcgcgtgccaccatgcccggctaattttttgtatttttagtagagacggggtttcaccgtgttagccaggatggtctcgatctcctgacctcgtgatccgcccacctcagccttccagagtgctgggattacaggcgtgagccaccctgcccggcctatccttacctcttaaaacctaagtcctaaatatggacaagaacttgtccatatacatccttggatgcatatcccccgggacgcagctcctgaaaagcgaagtccagaccccagagccccatggagccaccccaaggatatacatccttggtaaagcaagagaagggatgtccagaatcataacttagcagctggaattaaaagccacatgttccttttcctggtggaggctcagagaggtgagttttccattacctgtgtggtagccaggagataggctagtggtcctcttgctggggttggtttgcaggtaagactagagggcaccagacagtggaagggggtcctctggatactgtctcttcccaaagggccaggccaaaagcaggttcttgcttaatttatcatattttactcatctggcctctggggccttgagggagggcagtgctgagcgggagattcgatccaggtgttgactgacagctggccagccagtgcagaggctagaggaactcactgacctgaggacttgggggctggagcagctgcatcattggccttgtattttaggccagagtaagaattttgggctctgggactcttagcctgtggatgtacattgcctggtctgtgctgggctctgcagtggccaccatggcgggtgcacgcagaaggcctggcccccacccttccagtgcaaactcttggggagaaacagcatccacgggtgaagaacaagatagcaacacaagagaagcctccatactgtgcacagttcagttcagagagcgggcatccttgaaagacgggaataattctggccttttgagataggtgggtctctgttcaattcctggccccgtcactctccagcagtgagaaatttcttaacttctgttctcaccagcttgcaggatgtcgtgattttgcctggaacatagtagagggctgcttgtcatcattctcatcgtcataatttttgtggggtggagtgggttatttaggggtcccagaggctgatagttgggttgggttgtaggaatggtgtgagcccaggcgtagggttgattcatctcttccttggcaacatggatgcaatttccctgcccttctgggaaggccgcttttctgtggcctgccagggattgtcccacagatcaattgggcaattttagggaaaacaaacttttttctacctttggttctgggagctgctctgatttcttcagagaagaaatgctccttctctgggctgatggtagccaggaaggagtaacaatgcctgtgtgtgcctgggtggtgggtgtgtgcttgtgtgtgtgtgtgcacatctgtgcacatgtgcgtgtgcgtgtgtgtagggtatatatcactcacaggactggttctgtttttaaaccctgcttaccttcttcctccttccttacctgctcacaccctgcactattccaagaggaaactcaatccctgtccaacatttgcagaatcatggggtttacacagtagtgttgtgaatagattgtgcgtgcctgggaaccaggacctccctctccccactatgtcaggataatagcctgcctgcacctgacctggccaaggtaatgctgcaccatgttgctgagccccacaaccatggaatgttgagcaggggactttggtgatcttggagtccagcacctttattttacagtgaaagaaactggatccagggaggtgaattggtattcccgagtcacatggttgccagtggccaagagacttgatggagaagaccaaagaagggttctatttttgatcctaaatgtgattatgaaattgctgacacctccagtctttgcttggaaactagaagaggaaggggccatttgtccctgtgcttattgagggagggggtgttagtttcttctggaggagtctcttactctttccagactccctggagacatgggaggctggggagtgagcagggaagggacctgctgctcagcccagccgggactcaccgggtgtctgcagtggggcttctctgacctccaggctggtgggctggtggaatgccaggagataaggagtccagagtccgccccatcgactgtcgccagccagggcttcatgcccacctaggggacaggagggcaggccctagaacacagggtcacgaagccccactatcttgttcccccctccccccactaccgtgggcattaaacctctcagggggcccctggttgggcctggcagaggcagagacgcagaggctgggccctctgacctgcacaaggaaaagaggccgggaaagccacagaattggcctgcccaagggagcccagagtgcccagccatgggaaaccgaattctccgccttggcaactggagatcggactgttgttagaactcctaacctccctccaagggcaggccccagagaatcttggggcttggtggaatgagaaggtgaatgccctacatttattaccgccgagttcctaatggccctcgtaggcagtgcattcagtattagtagttaataaaaaaaatcagataaaagttggatatctaaaaaaaaaatacatgtctttttttttttttttttttttttttttttttttttttgagacggagtctcgctctgtcgcccaggctggagtgcagtggtgcgatctcggctcactgcaacctctgcctcctgggttcaagcaattctctgccccagcctcccaagtagctgtgatcacaggtgcctgccatcacacttggctaatttttgtatttttagtagagacggggtttcaccatgttggccaggctggttttgaactcctgacctcgtgatctacccacctcggcctcccaaagtgctgggattacaggcatgagccactgtgcccagccaaatcatatcttttatctttttttttttttttgagacggagccttgctctgtggcccaggctggagtgcagtggcacgatctcggctcactgcaaactctgcctcccgggttcaagccattctcctgcctcagcttcccgagtagctaggattataggcgcccgccaccacgcctggctaatttttgtatttttagtagagacgaggtttcaccatgttggccaggctggtctccaactcctgactttgtgatccgcccgcctcagcctcccaaagtgctgggattacaggtgtgagccacttgcacccggcccctttattttatctttaaaacatgtatgtatttttattcaccaaaactttgatttagggccaagccctttcctttgagtctttagatcccttatttagactacttagaaattgtttgtatataaaaatcatacttaaatgtattacctgtaatttctcatttctttcattttattaaatttttttttcctactaggctccgtattcacatagttgaaaaatcaagacggtaaaaaacagcaaaaccttgtcttcccccagcttttcaataaatgctccaaggtagcattttaaacatcattcagcaccttgcttttttcacctagcaactatattaagatcttttccatatcagcacatagaatgcttttagcattctctgtcatagctgtgtagtattgcatagtatggaagtatcatcttttttaaccaacacacatatcaccctgtctgcgcttatgtttgcagaatatatctgtgaagtggaatcgctgggtaaaaggttaaatctgttaattagctttcactaaataaaaaaatgaagcgaagacaagagatatttgcaaaacagccatgttcggaatccagttactgcttttatgtacatacctagtttaatttcagctttttattatttttccatttgcaacaaatctttctagatgagtaattctcaaactttttgatgctaggaccccttacattgtcttttgtatatgtggctatctgtattgatagtatattaaaaattaaaactaagtaaagaaaaatttttttgagacatggtctcactacgttacccaagctagtcttaaactctggcttcaagcgatccttctgcctcagcctcaagactgagaaattttaaaatagttatttattcatttaaaaagcaaaaataaggcgattacacgttaacattaaaaaaaaaaatgttttgaacgggcgcagtgactcacacctataatcccagcatgttgggaggccgagctgggcagatcacaaggtcaagagatcccgaccatcctggccaacatggtgaaacctcgtctctactaaaaatacaaaaaattagctgggtgtggtggtgcacgcctgtagtcccagctactctggaggctgaggcaggagaatcgcttgaacctgggaagcagaggttgcagtgagccaagattacgccactgcactccagcctggtgacagagcgagactccatctcaaaaaaaaaaaaaaagtttcatgaaaaataactatattttccaaaataaagtagtcaaaagaatggccttgttagcatatttttagaaatttcaggattttaaaataattatttattggatgataatgagataacaggttataataggtgtaacttaaatttgctgttaagaagtcagttaaaagttctgagaacaaattgagctaatctctgagaccacctatatattatattataccctaaacttctaccttagaaatttctcaaagactcaagatgacacaggtacgtgtcacatttcatgtagcttctgaaaagtgagagtgaaaagcttttaatttttgtatattagaataaaaatagtcttttacttcagggaccccaggtgtcatataagacagtaatttcagaattactgttcgagatcacttagcttaaatttctcagaagtcagacatttttctttgcatttattcttcagggttttttgtttttgttttctcgtttttttttttttttccaaggcagagtgtctctctgtcacccaggcgggagtgcagtagcgcaatctcaccgcaacctatacctcccaggttcaagtgattcttctgcctcagcctctcaagtagctgggatgcagacacgcgccaccacgcccagctaattttttgtatttttagtggacatggggtttcgccatggtggccaggctggtctcgaactcgagctcaagtgatccaccggtcttggcctcccgaagtgctgggactgaagtgctgggactaaaggcgtgagccaccgtgcccagccctcagttgttatttaaataaatcataatcatttaaataaatagaacctgcataaagaggtttgggaataggcacagctgttggcatgggaaccctcaatggtgacagcaggtggtggggttggggggaggttggccacctggcgaggggcctgttggctgcagggagggactggagacctggggtccttgagcagtccagtggcgctcagctaagagagctgctgagtaccatctccattcccgagatgcttgtgaaatgtgtgaggagctatgcatgtgtggaaagtcagatgcaggatggccttcctgaagctgcagtaagtggaacagaggaggggtactgggtgaggccagaggagggagtggcaggaggtgacagagaaggcttcttggggagggactgagccacatcttgaaagctaggaagcgggagagagagcagggtcctggtaaggagagccgtgtgaatgctggtgggatggtacacgtggcccagagtggctgagagggagcagcaagtgaggtagctggaaatgtacgttgggtctaggagtcttgaatggctcgggtgtctaaggtacgagtgttctcttggaactcagagctgtttccatatcagagacttgccagcagccctctgtcttggggtgcagcctgccagcctgctctttttttttttttttttttttttgagacagggtctcactctgttgcccaggctagagtgcagtgggtatgatctcagctcactgaaacctcccctcctgagctcaagcgattctcccatcacagcctcccaggtagctgggactccaggtgcacaccaccacacctagctaatttttgtgtttttagtagagatggggttccaccatgttggccagcctggtctcgaactcctgacctcaagtgatccacccgccttggcctcccagagtgctgggattacaggcgtgagccaccgcgcctggccagcctgctcttatctggagcaactccatggccccacgtccatgtcctctgtaccagtccacttcctccagcctcctgccaccttccttagccctcagaagcatctagcagcctcctttccagtctgaacacagcccttagaagtctctcccagaaactgtaatagatgtgattaactatacacagaattcccccaaacaattgtttggtatttttgtcgactttatttccttctgattattaaaagtaatgcatgcatattgtaaagtgcaaaaaagtatttgggggaaagtcgataatcctgctgcagtctctctttacatattggcatatttccttacagttgttttttttttggggggaggggatacaattggctatctacacccatcttacctcgacatcaaaatttctccctaagcatttattctgccttatggctgtatcttttttttttttgagacggagtctcactctgttgcccaggctggagtgcagtggcacaatctcggctcactgcaacctccgcctcccaggttcaagcaattctcctgcctcagcgccccctaataatagctgggattacaggcatgcaccaccatgcccggctaatttttgtgtttttagtagaggtggggtttcgccatgttggccagactgatctcaaactcgacctcaggtgatctacccgccttggcttaccaaagtgctgggattacaggcatgagccactgcacccagccatggctgtatcttagtttgcttaaccatttccttttattttaaacttttcttttgaactaattttagatgtacagaagagttgcaaaaatatagcagaattcctttatattcctcaccccagagtataattatataatcaggagcaggaaatcaacattggcataacactgttaactaaactgcaggccttatttaaacgtcaccaatattttcactaatgtccatttgctgtttccaggatctgatatgggatcccacactgtttagttatttctccttagtttgctgcaatctgtggcagtctctccctcttttcttgctagaatgttggaacgcaaagtgatgttgcatcctttagaggtattcatcatgtcacagttttttgttgttgttgttaattttgagacagggtctcactcagtgcacaggctggagggcagtggtgtgatctcggctctctgcagcctccacctcccagtttcaagcaattctcctgcctcagcctcccaagtagctgggattacaggcatgagccaccacacctaattttttttttttttttttttgtattttcagtagagacagggtttcaccatgttgtccaggctagtcttgaactcctgagctcaagtgatccacccacctcagcctcccaaagtgttgggattataggcgtgagccactgcactcggccatgttggagtatttttttactggtgacatttatctagattggctggtgtctgcttgatttccacactgaaaaaaggtgggttttctgttgttgttgttttacaaaaactgaatggggccaggcacggtggctcacacctataatcctagcattttgggaggccgaggcaggcaaaggccgacgtcgggagttcaagaccagcctagccaacatggtgaaaccccatctccactaaaaatacaaaaattagccaggcatggtgacatgcacctgtaattgcagctactcgggaggctgagacaggagaatcgcttgaacctgggaggtggaggctgcagtgagctgagatggagccactgcactccagcctgggcaacagagtgagacaatgtctggggaaaaaaaaaatactgaatggataaactgaagaagttatctttctttccctttgtagtttcaggagatactttgagactatgcaaatcctgtttctccttgtactttcatcccctaattttagcacccatctgtagaccctgcttgcaacaatgatgactgtgatgtttgactaatgattctctatttccctcttgtacatttatttattggaattctttgtaagcaagagctggccctgcttccccatttatttatgcatttggttattcataatcagattttgttctgtgggttaaagttgaataatattttttgaggctcaaattgttctagctttgaccattttgggagctccttccggttgtctcctgtgttcttctggtaagcccctgccatttttttttttaagtgtttccttaatttcctttactacaaaatattccaggctcatcttgtaacttcgctgccccagccctagagtcaggcacttctccacggagtcctgctttcctttattggagaatgctgtttagaaaccaaggtctggttgctaggtatgttcattgctacagcagttatcattgcttctgggtcctctcagcagacaaagctaggaaacagataattcagcacctatctgtatatatgtatgctaaagaatatgagtttgtactgataacgcttattctgatctaacctcaaaaagttcgttttattttagtctttcccttttcatgatgacttctttctccaacagtgaaaaaccctctcagtcattttcttagttggggtgaaggttattttccactggttttgctcctattatcgtggccctgattaacacacatttccacatgtggactatagattatttgactcaactcgcctttgagatgataacatctggaggcagaggcaagtgtttctgattttacatactctgtgattctgcacccagagctgcactaggatgtactgaatgcttgatcagcatcttacctgctgaataccccatttggatctgtgcccgctcggctatgctctccctctctgcagttcacaactctcctgccaattgtatttgtcttaaacaatactcctttcccgttcctagctttagaattctttgtgagatgagaactgtagcctaatgttagaagctctaaagcctgcccggtccaagatcagaaaccactaccactcatttccataccacctgctcttggtaggcatgtgtcagtagaatggattaattggaagtaaactggaataggacagagtgcagagacccatactgcctggccctgccacctgtgaccagaacttgtcacttcactgctctggggagtggaggtctatcagagcaggcaagtgtgttagtatgacacacttagtggcttgaaacaacacccgtttatcatttctcaattctgtaggccagaaggctgagcattgcatgactggcttcattgctgggggtcctagaagactaaacttagggtgtcagttgggttttcagggcctctgccaggctcagatggttgtggaaaattcagctccttgtggctataggactgaggtcccctgccccctcacccctattttccattgctggctaccaggcaggggccactctcagttcctagaggcccccatatttcctttccatgtggtctcctccatcccctgtgacacagcctgtctcccacattgagtcctgctcatgcttcagctctttttgccaagaggagccatccttgtaagggctcaccagctttgttctggcccactcaacgtaatttcccttctcaggtcaactgatgtggtcagcaaatacctgcaggctcacttttgccacataatgtgccatgatcccaggagtgacgtctcatattcatgggtcccgcccatacacagcaatgagggtcactggagtcactcttagtgttctgccagctgcagctgaacatgatcaggtcttaattctggcaccaaagtatttacctgtggatctgtgtcccatggttcccctgacaagataccagaaacttggtggcttaaaaacgacagaaatgtattcttataggtctggaggccagcagtgtgaaatgcaggtgtcaccaggaccatactccttctgacagctctaggggagaatgcttccttcttttcccagcttttggtggctcctggcattccttggcttctggctgcaccactcccatctctgcctctgtcttcacgtggccttcccctgttggtgtgtgtctgcatgtccaaatctccctctcctttctcttataaagacataggtcattggatttagggcccatcgtaaatccaggacaatttcatcttgacatccgtaactgattttatctgcaaagtctctatttccaaataaagtcactttctgagatttcaggtggacagttatttgcggggatagtattcaccccactagattcagggttgtgggaagtgttgcttactaaactctggttcacggagctgccaaagaaaagagatttatttttaaacctaggagagaaggcaagcttggctgctgtggaggctggggcccatcctcagaccatctgctcccctcatggtgacacagatctgaaaaccaggtgggttgaaggctggcctagaggccctgtgtccttaagatccagacactttgcagtacagtcagctcgcagtctctgtctttgtggattcaatcaaccacggatggaaaatatttgagaaaagaaacaaaactggccgggcgtaatggcttacccctgtaatcccagcactttgggaggccgaggcgggtggatcacgaggtcaagagatcgagaccatcccggccaacatggtgaaaccccgtctgtactaaaaatacaaaaattagctgggggtggtggggtgtgcctgtaatcccagctactcaggaggccgaggcaggagaatcccttgaacccgggaggcagaggttgcagtgagccaaggttgtgccactgcactccagcctggcgacagagtgagactccatctcaaaaaaaaaaaaaaaaaaaagaaaagaaaagaaacaacactaacaatataatggttaaaaagaatacaaataaaaaaacacagtataaaaattattacataccatttacattgtattcaatactataagtaacctagagatggtttaaagtctatagggaggaagtgcgtaggttatatgcaaatactatgctattttatatcagggacttgagcaattgtagattttggtatcctggaggcggagagggtgtcttggaaccaatcccctgctgatgccaagggatgactgtaccagcaacttgcctctgtacagagagctctggttgagtgtgacactgtcctgtaggatgggcaggggacagattgtggtacccctgtggcaaagagggaaaactgaggtcagagagcttaagtgattgcagagtgtcgtacttagaagggacagcagtgtttggtccagcagtcttgaagtgtcaggccagttcctggggctagaaagaggctgatccatcagcacctctctagcccgaggtggcctggacctcacccagaaagttgtgattcaggaccgagatgaggcctcagtgttgccactgggttagggacccacgcacagatgcagtcgaagactggaatctgtttaatacctccaagtgaagatcctcaaaaagggagcaaaaagcaccatccctccctgcagcaccctaccccctgcccaacttatcagtaagcctttccattcctgttttttttttttaacccccagagatggggtctcactctgtcgcccaggctggagtgcagtggctccataatggcccactactgatttgacctcccgggctcaagtgatccttccatttcagccttccaagtagctgggactacaggcatgtaccaccatgccaagctaattattgtatttttagtagagacagggttttgccatgttgcgcacgctagtctcaaactcctgggctcacacaatccacccccttggcctcccaaagtgctggaattacgggagtgagccaccatgcccggcctctgaatttttttttttatacagagtcttgctctgtcgcccaggctagagtgcagtggcgcaatcttggctcaccacaacttccgtctcctgggttcaagcgattctcctgcctcagcctccgaagtagctgggactacaggcgagtgccaccatgcccggctaatttttgtatttttagtagagacggggtttcaccatgctggccaggctggtttcgaactcctaacctcgtgatctgcccgcctcggcctcccaacttgctgggattacaggcatgagccaccgcgcccagccctactctttttttttctccccgagacagagtctcgctccgtcacccagactggagtgcggtggggctaggctcacggcaagctccgcctcccgggttcacgccattctcctgcctcagcctcccaagtagctgggaatataggcgcccgccaccaggcctggctaatgttttgtatttttagtagagatggggtttcaccgagttagacaggatggtctcgatctcctgacctcatgatccgcccgcctcggcctcccaaagttctgggattacaggcgtgagccatagcgcccggcccctaaatttttttaaatgcaagaaaacacggctgtatatgcctatactttcagggcaggagaggattttccaagcatgttactaaaagcagaaactttaaaaaggaaaagtatgacatatttgactttacctctttaaaaattgtgtcaataataccagttaacaaaattaaaaggcaaacaactaattaggaagaatatttgtaacatgtgacaaaaggttaatatcttgccatataataaaccaataaaaaaaacaaatgaatatatcagcaaaaatgggcaaagaaggctgggtgcagtggcttatgtctgtaatcccctcactttgggagaccgaggcaggtggatcacctgagatcaggagtccgagaccagcctggccgacatggtgaaaccccgactctattaaaaatacaaaaattagccaggtgtggtggtacgggtctgtaatcccagctacttgggaggctgaggcaggagaatcgcctaaacccagggagggggaggttgcagtgagccaagatcatgctactgcactccagcctgggcaacagagtgagactctgtctcaaaaacaacaaccaaaaaaaacaggcaaagaagagtaacaggtaatttgtaaaaaggagtagaaatataaaagtaaacctaaaacgttgataatcaaagaaatgcaggttaaaataattagaaaaataagtaatttttaacctatcaaattataaagacggaataatttaatactcagtattggtgagaatcctatgaaataggcactcatacacaggtagtgggagtatggaactagttaaatcttggtcaggcacagtggtatgtgcctgtagtcccagctacttggacagatgagactggggaggattgcttgagttttggagttcgagactagcttgggcaatgcagcaagacccatctctacaaaaaaaagttaaaaatgagcccaccaggcttggtggcatgtgcctgtagtcctagctacttgtgaggtaggaggatcccttgagcccaggagttgaaggctgtagggagctatgatccgggcactgcactacagcctgtgccacagaagtgagaccctgactctatttaaaaaaataaataaataaaacttacaaccttgagggttttgttttgttcctttttgagacagagtcttactctgccacccatgttggagtgcagtgtcgtaatctcacctcaccatagcctccgcctcccaggctcaagcaatcctcctgcctcagcctcctgaatagttggaaccacagaggcatgctaccatgcccccgctaatttttttttttttttggtagagacggggtttcactatgttggccaggttagtctcaaactcctgggctcaagccatccacccgcatcggcctcccaaagtgttgggattacaggcgtgagtcaccgcggccggtggcggtgtttttcttttagcctgaggatagggatccttgtccatgcaggtcttctgctggctttggtggaaagctgggtgtggtatggtatgagccagaaaggaccactgcctctgctcaggaggatagcctcagcaaatcatatagtaagttcctaataaatatttgttgactgtaacccctgagggcagggactgcctcccagccaattttgtccctgcatctcaggattcctttcattcttggaagatcccttctgatccttttctttgttccctgctggggaacaaggatccaggagaggaggaggcagccagctcaccagaagcacctcatccacccgcacagggattactgggctgctgtcctggagggacagacctggaccagctatattgtttcacttattttactggaagccctaaaagttgtatgggagcaagtggggtggggtatggggtgtttatcttgttatttgaaagagccctgtaagattgaacagtctgcactctctgtcctttcctggaagcagagggccccggccaggccccagggactgggcgcttgttttcttagagcacagcgtacttgaggcttggggccaggtggagccgtgctggcctgcagggaggctggccctgctttccctaccaggaaacagagatgacaaggctttgagccctggaattcctccctgcctccgcccttctctcctgctcactgagggcgcgtcctgtgccctgtcatcccaggcccatgtgactccaattggcgtatctgtattccaattccaatgctgaccgtttctccagggctggctgttttccatctgatgggctgggtaattctcaggataccaggtccctgggcagcaagccacgctgttcccatctcccttcccagaaagatgcaaaaagtacaaagtcacccactcccccaggcccgggctgctgaccaagtgccagctctcagaacagaaattccatgtctcagttcctgttcccagctcctcggccgccccctaacacccagcagacgctctgtggtgcctcccacggcagaagccttggccgtgggtgaactggtgtgtgcagtggctctgctggccagctcccggctgtggccatggtgactctggcatcactccctcttggcagcactgggccccctcccccagcatttcaggatgtgtgtgatggcagggaaactcaaaatttccatgagccactgagaaattctagaaacagcctgtacttgtggactttcctttttcttcctctgccacagggaagagtgggaatgttatttttggtgggattatcagctggttgaccttctcagggatgtggaaagggaggctgcctgcccgcccgggcctctctcccactgcctgcctttgtgtcccccaccccacctcactttatgttttaaaaaaaaaaaaaacaactctggcgggcgcggtggctgacacctgtaatcccagcactttgagaggccaaggtcgacagatcacttgaggtcaggagttcgagaccagcctggccaacatggctaaaccctgtctctacaaaaaatacaaaaattagccaggcgtggtggtgggtgtctgtaatccagctactcgccaggctaaggtggaaggatcgcctgaacctgggaggcggaggttgcagtgagccgagattgtaccactgcactctagcctgggcaacagagtgagactgtcttaaaaaaaaaaaaaaaaaaatcttggccgggcacggtggctcatgcctgtaatcccagcactttgggaggccaaggcaggtggatcacctgaggtcaggagtttcagaccagcgtcaccaacaaggtgaaaccccgtctctactaaaaatacaaaaattagcctggcatggtagcaggcgcctgtagtcccagctattcaggaggctgagactggagaattgcttgaacccgggaggcggaggttgcagtgagctgagatcgcgccactgcactctagcctgggcaacagagtgagactcctgtctcaaaaaaaacacaaaaaaacaaaaacaaaaacaaacaaacaaaaaaactccaccttaatgttttacatctgtattccaggccagcttctctggctctccagggtcttcagttccgttgaaacaactgcaggagaggggggtccctgccctctccccaaggttgcttgtagttcacccgagcataaagaccaaagaacagtaaaagtgaaatgtgtggcgcctcatgaatgggcagtgggaaagtaacatgctttcagtgggtgttgtttggggatggacaccaggtactacccggccctccagtctctgccctcctggagctgatagtctagttaggaggagatggataatgaaaaaagactaatagggcattagggttctcaatgcctgggagtgggcttttttgtccacattgaagaggcgacgcttgaactgagacctgttaggaagatctaggggaagagcattctaggcagagggaatagcaggtgcaaaggctctgaggtcagaatgagcttgatgtgttaaagggatgggaagaagggcctgggtggctggagcccagtgagtgagatgagccagttatatggtcagcaggatgggcaaaggccagttgacacagtggtctatagaccaggaagaggagtttagattttattccatgtggctgggtgtggtggctcacacccataatcctagcactttgggaggatgaggtggggggattgtttgaggccaggagttcaggagcagcctgggcaatgtagcaagacccccgtcttgaaaaaagttaaaaaagaaattagaatgaaaaagattttattcttcatatactgggaagacattggaggggttgaagcaaggaaagtgatgtgatcaatttgtactttattttattttatttttttgagagacagagtctcactcttgcctaggctggagtgcagtggctcaatcttggctgactgcaacctctgcctcctggattaatgtgattctcctgcctcagcttcccaagtagttggaactacaggtgtgcaccactacgcctggctaattttttgtatttttttggtagagacggggtttcattatatgttggccaggctggtcccgaactcctgacctcaggtgatccgcttgcctcagcctcccaaagtgctgggattacaggcgtgagccactgcgcctgacgaatatgtactttagaaggatgactttttttttttttttttgaaatggagttttgctctgttgcccaggctggagtgcaatggcacgatctcggctcactgcaacctccgcctcccgggttcgagggattctcctgcctcagcctcccgagtagctgtgattacaggcatgtgccaccacgcctggctaatttttgtatttttagtagagatggggtttcgccatgttagccaggctggtctcgaacttctgacctcaggtgatccacctgcctcggcctcccgaagtgctaggattacaggcgtaagccaccgtgcccaccccagatgactctttcattaagctgtgaacttaagatttgggcacttgatatgtgcatatgttaaacttaaaagaggggagttggggactctgacagaacagagctaggtgctgagaggaagctggaagcccaggtaagagattgtattttatttcaacatttcctccattcaaattccttgtactccatccactttgcaaggaagacttggatgatctcttgtcctcagggagtttacaatgcagtgtcttcagattcagagagtccttccaaattttcctggagggggccttgaagaatgagcagcatttaaaaggctattgtcggccaatcgtggtggctcattcttgtaatcccagcactttgggaggctggggcgggaggatctctgagccaaggaattcaagaccaggctgggcaatagggtgagaccctgtctctacaaaacaataaaaaaagtagccaggcatggtggtgtgaacgtctggtcctagctgcccgtgaggctgaggtgggaggatcgcttgggtccgggaggtcaaggctgcagtgagctgtgatcatgtcagtgcactccagtttaggtaacagagtgagaccctgtcttaaaaaaaaaaaaaaggcagtagttattaaaaacttggagtgtccagttggtgttaaagtcgtgatgcagttcattcatccactctcttgctgatgggcttttgggtccgccctggttttttgttactgtgaatagtgctgccataagacgtcctcggggttgaaagtcacccagaaaggagcctgtccgagttgcaagctaaaagcagaaacgctttgtggcaatcgattgctccctggggttggtgttagctggaaagggtaagcctttaagtctggttagaattttgatcccttgttaataggcaggcaggcagtttgcaggacgtggaggagtgaaagggcaagtggaaatacataagtggttatgttgtcagggaagtcacttcttttgtgccatattttctggaaagtgccaccataccccctgccttgaagtttttaaacctgaggatagggggccttgtgtgagcgggtgttggatcgtctggccctgagtgagagctgggtgtgatatgagccagaagcctctgtcctggaacccatttgtgtgtgtgccctaggcagcctctcttcagagccctgggccaggttcctcctgcttcctttgtgtctctggcagggagctttaagaagacacctgtagccgggagcattggctcacgcctgtaatcccagcactttgggaggccaaggtgggcagatcacctgaggttgggagtttaagatcagcttgtccaacatggagaaaccccgtctctactaaaaataaaaaatttagccgggtgtggtggcgcatgcctgttcatgtctggaggcaggggtgaggatgtgtctgtctgtttatatatgcgtttgcacggtgagtgtgtgcatgtacacatttaagcagcaggtgcttattaagatcctaccaaccccacaggactgttaggaaacaatcagaaaaacctaaaatataagccctgtccttctaggaccatatgacactgaaactaagcaggaggtgagaatgtttcctggatggggatgggactggtgctggaggattggggtggatctgaggtggtgctatgtcctgcagtacaccctgttttcttcatccaggcccttcacaccttgtggagagagtgcatggggtgcgtgcaaaccactgacatgaatgggacttcctagtcctgtggcggggaggagtgtggagatagaaacgtgtagggatggaggggtaggacatttcagatgcagcccagggcaagagagcagtggcaggtgagggtgacagtgggtaggacgccagttggagagacccctgactcccaggcagaagggccatagcacattgctggagggacggagtgttgggaggttgtgctttgggtggggaggggcggtgatgaagtgggggcaggaggttctggaggggaggggctgggtggccaggagggaacagcaggggctggagtgtttctttctgttcaggagcctggaatcgtagggggatgctctgggttcgtggtgagccccacagggagaaagcagaggatgtgggaaggccttaacttcagtaatgggatggtggctgccagtgaccttgagccagaagaatgtgctgtgtgggaggtttggacagcccgagggagaatggaggaattatgattcacttgtctacctttctaacccaatttggaaatatgggcttttcctttctttcagtaaccctctttctcatgagaatggggcttttttattaatctgttgataagtatttatagttactgagaaatcaaaagttcaagatgcagcccctgcctttcttgctggcgccctggtcgtgccctcttgagcagggacgacgcaggggctgggctggaaggggccggcgctgagcagcggcgcttcttacctgttttggttaagagatctggagatggaatgaaaaagcgctggctctgcctgtgagaccggtagccctccgacttcagtgtgcatcatgatcacctgagcacttagtcaaacccaagttgctggtccaaccccagtgtctgatttagtgggttatggggggaagtgctaagagtttgcacttccagctagttcccaggtgtcagtgatgctgctgttccagcaaccgcactttgagaacccctttcctggagaaattaccacacaagactctgcatctcagctgcagactggcatgggcggggtctttgaggaggagtcgggcgtgagcgggcttgagggctaggagatcgcgcagggggaggtagtggtacaggaggacccgggggaggtggggtaggctgggggcaggtggtcttggctgcaggcccagcagtggggttgccactgaggcttggcttctggggtccacttgctgcccatccaagcatgcctcgctactgctgcacaggtgcttgtcatgggccagcagattgacgtgagcagaacacaaaggctaaaggtctgccaagggcccacctcccctccccggggtggcgaggtgagaggcttaggggggctatcagtcattttgagaggtagggcgtgcacaggcttcttgtgagaggcccttggaggcacattttgctcagggtattgctgccagagagttggagttagcatttattagtatttattttactattttgctttctttttacagtccagaggtcttttggtttttatacctgttatgccgtgaattcacagggaagaggttccagtagctcaggcccgtacccttggtcctcacagtgccctcctctgggtggggcaggctggcccttcagttgaacctaggtatctttctcttgggcttccttctttttctggtcattttcctgcacgcgttccaggaagcggtcttggctcttagagcgctcactgtgctcaatacgcacattaattctcttggccagaatcttgcccttgtttgtttacagctatgccgacagcatggtggggaacactgcagacgcctctggttttgccatggtaacatctgtgggttattccttttttgaacagtacccattcccttgaggtctaatgtctacagtatcaccttatagattcccttgtatgtggtcaaaggaacaactccatgtttcctttctttttgacactagagcatacttttttttttttttgagacagagtctttctctgtcacccagcctggagtgcagtggcacaatcttggcccactgcaacctcctcctcctgggttcaagtgaatctcctgcctcagcctcccgaatagctgggactacaggcacacacaaccatgcccggctaatttttgtacttttagtagagatggggtttttccatgttgactggtctcgagctcctagcctcaagtgatctgcccacctcggcctcccaaagtgctgggattacaggcatgagccaccgtgcctggcctacaactccatgttttctagaaggcccctctcctcttcccctttgtgttcgtcatttggtcaaattgctggaagatggtggttccagctgaaaggctttttaaaatttttaactttttttttttaacagggtctcgctcttgtgcaggctggagtgcagtggtgcaatcatagcttgttgcagcctcaaactcctgggttcaagcaatcctcccacctcagcctctcacactgctgggattacaggggtgagccaccacatccagcccttgaaccagtcttaagtgtgtaacagtcccgcggggagagcctggacaccttccggagggtggatcctgggacatgcatttccctggtgtggctcatggcaaggacagtgtggttctggagcaggcggcttcttgtgccatagctatctggtgggagcacaggcagcagctccatggcatcccagctctgcaacgtgatctttgcaaataggtagctcctgggacttagcctagagtcttgttaattcagctcttcgaaggagcctctaggccatttaatatcctgtacaaaacccctgtctgccaaaatagcctaactgcaccctgatctatacatcccccttgtcatcatcattcaggttaggttccttgttgaattgtttgctttccctactttgttgagggcaggtgctaggtcctttgcatccccaatacctagcatgacttctggcacataattggtaagcagtgagtatttgttgaatggataaactcttggagtgagtttttaaagccagcaggtaatatgctagcttttagttcaattaatgtaaatgaaattcaaggtcagggagttgtttactctagagaagtgcataataggtggtcctgacacctgacttcagatgatctgggttaaagttggtctgtgggccaaggaggatagaatgtccttggaaagtggttctgagctccctgttcttttttttttttcttttgagatggagtctttgctctgttgcccagggtggagtgcagtggcgcgatctcggctcactgcaacttctgtctcccgggttcaagcaattctctgcctcagcctcccgagtagctggggttacaggtacccgccaccatgccctgctaatttttgtatttttagtagagacggggtttcaccactttggccagggtggtcttgaactcctgacctcgtgatccgcctgccttggcctcccaaagtgctgggattacgggcatgagccaccgctcccggccagggctccctgttctttatcaggttgcaggggcgatgcaggccgacttcagttagaagggaggcaaaacttctctgtctctagcacattatgtgcccagcactgtcccaggcactgtgttgcaggcagggaggagaggaggacatagaagaaataggagggaaggatgcatttcagaaagttatcttcaaggaatacaaatctagctggggaggctccctgggaaacaaggtaatgaggagtccataatagccagagaaaagtgctggaaaagtgacccaagacggcttcctggacagggaggcaattgaacagaaccagaattcaggactaagtaaagccgttgtcctgagaacccagaagatggggaactaggaaggtgccgggctcagtgctgtgctgtgcagcctttaagctctgtcttgatcagagtgcctctgcgagctcggtgctttcacagtttaattgtgccggacacgcttgggaagttcctggcaggccccaaagttgaacccagggcgtgtggcacgtcgtgttgtccagtgatttggccactagatcattctttctatttatttatctgatcccgaataacaagccgggaagttctgcttcatgggggtgacgtaagtgatggatgtgagtaccgcgtttcctaagccacatgcccggcctcacggtctgacaaatgggagtgaacttggacgacagggagaattttgcaactgtctgggaagtgttgatggatgaatgatgagaagtgaggtgactctggccctggcctcgggtggggaaaacaccggctggccactgtgggcccttcccgggtccctgcccacctgactcagttgctttgggaagtcccctttgctccagctccagctgggctggagcaagcctggcaaatgtgctccctccctccctccctcctcctggctccagcgcctgggcctggctgtcattacactcactccgcgctcagcgtggggctaaataagccattccctgtttgtctgtgccgctgcctggggccctgaccacccgtctctgcctcataacctcctcccacaggcgctggcacacacagtgggggctcagtaaatattagttggtgaacagcaggctcaaggttctaattttgttccctgcttctgggtcaccagagtttttattattatttttcttagttttcccatcctgcccctcccatcagcgcgaggtttcacaaggagagtgagtgggctccgctggccgccctcctgcactgtctggaaatttcccaccctgggtgcgctttgactgtgccaaggcttgaggcgaaggtcctgggagcaggagctggaggaagataatgcatcctttcagggtatggaggagagcagtaggtgggagggcaagaggaggcagggggagaatgggccgattaagccccggggcagggccaagcgagggttggttttccaactgtgagatttgctgtttgcctgagtgaaggtgtcagcctaggtcagcttgtctgaggggagagtggcttctcacacggtgttctttgggtgagtggggtgggccatgggctggatggtttttctcaaagctctttctacccccagagaagcctgtagggcagtattcagttgatgaccaagctggcagatgtttgggtttctgatttcgtaaactgggactcacacagatgactgtatcgttgttagtttgaccatgaatatccagagtgtattaatcaagcatttgtaaaacatttggcagtttccgtagccaaatgtgttttttttaattgatttatgttattttgatgattttttgagacaaggtctttctctgtcacccaggctggggtgcggtggcacagtcatagctcactgcagcctcaaactcctgggctcaagcagtcctcccacctcaggcctcctcagtagcggggactacaggcattcatcaccacacctgactaacttttgcattttttatagagacagggtttcatcatgttgcctaggctggtcttgaactcctgagctcaagcaatctacctgccttggcctcccagagtgctgggattacagacatgggccaccgcccccagccctgtaatgattttttattatttcttatctgaaggggtgtttttttttttttttgagacagagtctcgctctgttgccaggctgaagtatagtggcgtgatcttggctcactgcaacctctgcctccggggttcaagtgattctcctgcctcaggctcccaagcagctgggactacaggcgtgcgccaccacacccagctaatttttgtatttttagtagaagcggggtttcaccatgttggccaggattatctctatctcttgacctcgtgatccacctgcctcagcctcccaaagtgctgggattgtaggcatgagccactgtgcccagccctgtaatgattttttattatgtctttttttttttttttgagttggaatctcgctctgtcacccaggctggagtgcagtgatctcggctcactacaagctccacctcccgagttcacgccattctcctgcctcaacctcccaagtagctggtactacaggcgcccaccaccacgcccggctaattttttgtatttttagtagagacggggtttcatcgtgttagccaggatggtcttgatctcctgaccttgtgatccgcccgcctcggccgcccaaagtgctgggattgcaggcgtgagccactgtgcccggccgattttttattatttcttataggaagggttttaatgctcaccgtcagtcctcttaccatactttctgcattcctgagctctccgtatttccatttctgtattaattacatgcatttcattgttaagtcgtatttcccccctaggaaggggactatattttctgacttctttcatgccccagaatttctgcctgttgtctttaccaaattgtgtgatgtgttggctggggatcatattctcggctcatagtttcttttgctctgaattgtggagactttctgacattcttgcattctcttctgacactgaatggtgctattcgggaaagaagaaggcagtttgaattttttcccgtttgaaagaagttttagtatgtttctcaattttcttttctctctttttttttttttgagacagagtctcactctgtcgccagcctggagtgcagtggtgcaatattggctcactgcaaccttcgcctcccgggttcaagcaattcccctgccccagcctcctgagtagctgagactacaggtgtgcgccaccacacctgactaatttttatatttttagtagagttggggtttcgccatattgaccaggttggtcttgaactcctgacctcaagtgagccactgcacccagccaggaaaatcttgtgttttatcttagaacacatcttccatttcattcttgggttcccctctccgggaatacgagttatccttttgttagtctctttgtcttctcactgtttttggtttaagttttcttgtccatctgcattcactgtgattatctcaaactttccttgagccatttatgcctagtgttccattttttgaacaccaagcatataggagttaatttatatcctgctcaaggtcatcgccaaagtctgattgcaaaaattcaaaaacttgcaacctcaggcttaaatgggttaaatgactggcagaattttgttctgtatttgtcataatgtattggttcttcagtgaggttttattcctcttttttagtaagcctgcatcctcttttggtctcacgttggttataatctcatctttgagctctcgtctcgtggaactgatgttttaatgaggttattcctccgtgtggagcagtggtgaggaacagctttctctggagttgtggtttacctgtctgtggcttgctttgcctgccgtttcttttcctcttcctcatgtgagtgcagttctgctcacatgttctgttggctctaaaataagaaaggaactttcctctccaggtttgtccccacctctcagctccaggagtgctaaggactgggtatttatgacctgttttctgtagcctgaaggaatgctagctgtgtggtgaggtgggtctgtcctctattcagggatttagtccctgcagtgtggctctgctcacttccttgggagttgtattccttttccgttagaagagaaggcacacttggccaggcacagtggtttccgcctgtaatcccagcactttgggagaccgagacaggtgtgtcacctgaggtcaggagtttgagaccagcttagccaacatggtgaaaccctgtctctactaaaaatacaaaaattagctgagtgtggtggtgcatgcatgtaattccagctactcaggaggccgaggcaggagaatcgcttgaacccgggaggcggaggttacggtgagccgagatcacgccactgcactccagcctgggcaacagagcaagactccatcttaaaaaataaataaataaatagagagagagagagagagagagagagaggggggggggagagagagagagagagagagagagaggggggggagagagagagagagagagagagagagagagagagagagagagagagggagagagagagagagagagagagagagagaggggggggagagagagagagagagagagagagagagagagagagagagagagagagagagagagagaagactaagtggaatttggaattggatcatgtcctcaattcagaatgtggcccgggagcccttatttccttccaagggagtcagcccattgtttttggtccaggtgcaccgtttttttttttgctcttccccggtagcttttcctcctactactcaactgaagaggaaaaagacttcctcttgccacatttggggatgtgagtgagaattctggttctgcccttgtcattcatttggtttgtcagggttgggccaggaatagaacatgagccatgcgtggtgcctccttcctttttccttgcctgtggttttgaagttaatatatctctgattagatctgttttcttgtttggttgcattggttaatttttttttcttttaaaagttctactcattttgttaattatcaggtgtaggaaaattacactcctatttcattttttcatcttaagtctttagtgtttcaatatgcttgtttttataatactcattaaactctgcaagtttattctcttcttttcaaactacggataggggttcattgtaataatatgttgcttgtggtcctaccgaaaattgggcttcagattcacgtccgtggcccttccattgccaggcagcgcttcccaggccactagcacccgcagtcctcaagagaagtagcccttgattttttttattccttaagacctcctcctggccgggcgcggtggctcacgcctgtaatcccagcactttgggaggccgaggcgggcaaatcacgaggtcaggagatcgagaccatcctggctaacacagtgaaagccggtctctactaaaaatgcaaaaaattagctgggcgtggtggtgggcgcctgtagtcccagctactcgggaggctgaggcgggagaatggcgtgaacccgggaggcggagcttgcagtgagccgagatagcgccgctgcactccggcctgggcgaaagagcgggcgaaagagcgagactccgtcccaaaaaaaaaaaagaaagacctcctccttccaccctgaggcctggctttgtcctttgtctgcaacttgtcagggtttttccctacgcctgggctccagatggctcttggctcacccagggccttttgctattgtgtgactcacagagagctaaccttgagccatggttatctgctagctggagatacatttctatcaggctcagcggtcacagccctagagtgggaaagggaaggaagagtggagaaagcgcagtctgcttgaagggctgatgcagaaatgagctgttttcctgggagagaaccccaagagagtggtgggagctacctttgtagttactgtcttgtggacggtcataagcctgggtgatgtgccaggatcatgggtccctcggagacccctttctctgtccctgaggaatatgtgagaaccagacggctcattttacgtcctttgagaagacagctgcggggacgtcttaggatgattcactgaggccagtcagtggtggaaccaagagctctggggaacataatttctatcagcctggcgtctacttggccgccccctccactccctcacccacccctgcaaccctgtggtctttctttgtgtagaccatcagccttctcataattttaagtaaaatgcttaataaaaccccggtttagactgtcttcaaaccgaccgccaccccagagcctgcagctgactctgaccccgcgtaagagccccaccctggcgaagtcctgtgcacccacacagcctgtgcttggcggggcacagtgggcgcgaggggtcggggggcagacacacagcttcttggcgtcggaaatcgtctgagttgggcaagtttgtctctggagcatttgagcttagttttcatgttgtgtttctgcgcccagaatctgagagtgggagtggtgagttccctggccagcagagtcggggtgcggtggggggttgtcaggaaagggaggggacaagtggatgcccggctgctctgaggccttgttggtttctgttgcctgttctcatatctatgcccaacctctagacccagcgtcacagaagtgaatgtttgctcctctctgagaggggaggtgggcttagaaaaaagtgcagcatgctgaacatcacagaagcgtctgtgcaggacagaagtgccgcttctaggcagagctacttctggaccaagtgaagggtgacggtaggtggaattccaattatgggcctctggatggtaaggcaacttctgcgcttccatagagggttccagaacaggtgtcttgctttttcctatgtctccctcccacctccccaagggttgggtctggcgccttagacacagaaggagggcactaaaataattttacttatttgaccctgaggcaagtgcaccctcaggcagagagactccagcccctctccagcaggaagagctggcctgggggcgctcccaagccacagcacacttcgttttgtctccttcccacttgtctttctgcccctgaaaggtgtccatccttacttgagggcagctggcctgacaccctggggggactggagtggctctccaggggccacacatggaatggaacctggcgtggggcttcctcctgcagctggggccatgcgcgcggacccctgcccggcctccccgtcccagcggcgtcaacagctgtgtgtgtttccctcttctttctttcctctctaataccttttacaaaccttttccccgctaagaataacttgtagttaaaaagaagacaagactccactggagcagaaaactcccctttcatgcctgccaaaaggccggggtcacttggacttaagtgtcactcgcagctcctagatcctccccaacccttgcgggtgagtgcatgtctcaagcgctggccaggcaggggggctgtgctcgctgaatctgcacaccccatggagacaggtctagacctgagcctggatgctgtcttgtgggcgtcagtgcccagtgcagcacacgtcctggaggaaagagcagctgtgctgcaggggagaaaaggtcacctgggagaagcgaaggtggtcctgtgggctcattcttctgatggtacaacttgaaggtgcctcttgcctagcactccaggctgtcatagcagccacctgaggggccgaggggccgctgggtctgggaaaagtaaatgcttcgtagatgctcacctctaggtgagtgccagccaggcaaagctgctaaaatcaccctgagtttcccacacctgaagtcttttggggtttgtttgctcagtggtttgaagttacagcggttaagtttgagaaatgcagctgaggggggaacatctgttggtttatcttgttgaagtagccccagagcacgagcactgtgacagtgtgtcctctaaaggctacctagggccgtcccctcatagcactgcagagcattgtaagccaagatttggatgcttgttggggctgttagacatcgggaaagatctgcacagagacacgcaggactttgtggatctccgtgggttccaggacatgtatttttatgtctttgtgcagagggcatggtggttaagaaagcactgaatttaacgtcattcagaccaggctttgatttacaaagcaattcagcttctggctttgctgcttgcttctgtgggtcatgtttcctaatcgctgaaccccagtgtccttgtctgttacgtggagtaagtttcccagcttctgttaaaggaactggggaatgccaagtgcttagcaaggtctgcaatcggtaaatgctagctgctgtccatcatctctttgccttttcttttctaaatacaggcagacctcccccttgttttgacagtacaactcctgccatcgacagttcacagtctgctctgatggataaccactttctttgtacaacaggtttttagtcatttttgcctaagatccaccctgctcgccaaaatttaacatttgtctcttggtggagatttgagagttgtgaatctcaaagtagcacttttacaaaccgtcgttgtggctgatgccgaatccatccatgtggactcaaaagtatatattccactgaagagtgatattttatgtccccagattctgtgcgtgccccatacgtggatcctaaagcatgtgatgtccctgggtgtatcacagtaggggacttaagtgatgtgtgtgccccagggcctgtagttaagatactttagttggccacaggatatgcctgacagtttcattagcagcctgatgtttgggttgagagagtcagagttgggaaccctgctgatttataagtcttataattattatagctaaattttattgagtgctttctatatggttcaggtacttggcaagggccttgccatatcttatgctgttagatcctcaaagtaatctaatgaggtggataccaattttatagatgagaaaactgaaggtagagggagactgggttgcttgtctgtagttacttacaagcagctgtgcagaaattcaaggtaggtttgtctgacactgaaggccatgataagctgcgtcgctgctttgagtgattctagaatgttgactccagttaaataattcatccaagatcacattgctggtaagtggcagagccaggattcaggcaagcctgctctcagccactctgccgctgttcctctgtcgtaagcaaagcctcagggcatgtgatgcactgagattagtgtccgagccctgggtgcctgggtaagaaatggctgcagtgattggctgcttcttggtctggagaaaggagactcattttcccctctggataatttgtttagatcactaattaaattataaccatactaagggaggtggttaacaaaagaaaaatcgtcatcaatcttactttaagctttcatttatctgtgttctttctttctgtctttctctttctcttctctttcttttttttttttttttttttttgagatggaatcttgctctgtcccccaggctggagtgcagtggcactatctcggctcactgcaagctccacctcctgggttcaagtgactctcctgcctcatcctcccgagtagctgggattgtgtgtgcctggctaatttttgtatttttactacagacggggtttcaccgtgttggccaggctggtctcgaactcctgagctcaagtgatctgctggccttggtctcccgaagcgctgggattacaggcgtgagccactgtgcccggcctcatttgtctgtgttctttctcagttctaaactctgccacataattgccctgctttttaacttgccgttatgccatgactcatttatagctgcatactattccatgaaactgatatgatttacttgacccataacacatctttctgcatatagcctttttacttttggattacttctattaaagcaaattaattaattattaattgttaattgagggatttatatattttccttatcacataacttttcaagagtcccattataggctgggcgcagtagctcacgcctgtaatcccagcactttgggaggcggaggcgtgtgggtcacgaggtcaggagattgagaccatcctggctaacacagtgaaaccccgtctctactaaaaatacaaaaacaaaattagccgggcgtggtggcaggtgcctgtagtcccagctacttgggaggctgaggtgggagaatggtgtgaacccaggaggcggagcttgcagtgagccaagatctggccactgcactccagcctgggcgacagagcaagactccgtctcaaaaagaaaaaaaaagaaagagtcccattatttatgcagtcaatggtatcttattctattgcttagcctcactaacatgaaatgttttatcttaaaaaattctggccgggcacggtggcatacgcctacaatcccaacacttggggagcccgaggcaggaggatcatctgaggtcagcagttcgagaacagcctgaccaacatggtaaaaccctgtctctactaaaaatacaaaattagccgggtatggtggccagcgcctataatcccagctacttgggaggctgaggcaggagaattgcttgaacccaggaggtggaggtagcagtgagccgagatggcgccactgcactccagcctgggcaatagagtgagactccatttcaaaaaaaaaaaaaaaaaatgttgctattttaataagtagcaaaatggaaccagccaagttttaaatttatattctcaatactatagagaggctgttttttatgtttgtttactaatttgtacagtatagaaataaacctatgtcatatcaaatggtatatatttttgccagtctgtaatttttctcttttagttatggtgtttgtttgtttgtttgtttgtttattgagacagagtctcgctctgccgcccaggctggagtgcagtggcacaatcttggctcaccacaggctctgcctgcagggttcacgccattctcctgccttagcctcccgagtagctgggactacaggcgcccgccaccacacccggctaattttttctatttttagtagagatggggtttcactgtgttagccaggatggtctcgatctcctgacctcgtgacctgcctgccttggcctcccaaagtgctgggattacaggcatgagccactgcgcccggcctatttatttatttatttattttgagacggagtcttgctgtgtcgcccaggctggagtgcaatggcgcgatcttggctcactgcaacctctgcctcccaggttcaagcgattctcctgcctcagcctcctgaatagctgggattacagacgtgcaccaccatgcctggctaattttttgtatttttagtagagatgggattttaccatgttggctcagctggtctcgaactcctgaccttgtgatccacccacctcagcctcccaaagtgctgggattacaggcatgagccacagtgcccggccgatgtttattttttaatagctttatttcagagcatttcaaacatatataagtagacagggccgggcacagtggctcatgcctataatcccagcagtttgggaggccgaggtgggtggatcacttgagcccaggagtttgagacgagcgggcaaatatggtgaaaccccatctctactaaaaatacaaaaattagccaggcgtgatggcaaatgcctgtaatcccagctcctcaggaggctgaggcaggagaattgcgtgaacctgggaggtggaggttgcagtgagccgagatcgtgccactgcactttagcctgggagacagaaagactgtctcaaaaacaaacaaacaaacaaacaaacaaaaactagacagagagtctgatgaattcctatctacctgtcacttagttccagtgaatatcagctcatgcctgatcatgtctcatccacacccgtgtgctcataccccctcctttattattttgaagcagtccccagatataagatgtcaaatccatggttatttcagtacctctaaaacgacttctaaaaaatcataactggccgggtgcagtggctcacgcctgtaattccagcactttggggggccgaggtgggtggatcacctgaggtcacgagttcgagaccagcctggccaacatgatgaaacccgatctctactaaatatagaaaaaaattagttgggtgtggtggcgggcccctgtaataccagctacttgggaggcctgaggcaggagaatcacttgaacccaggaggcggaggttgcagtgagctgagattgcgccactgcactccagcctgggcaacgagtgaatctcccgtctcaaaaaaaaaaaaaaatcataaccgcattgctgtttgtttttttttttttcatttttcaatctagtcaaaactgttgaatttgtcctttttattcgtttttattctgtgctttcaaaagaagggtttttctcaaaggctaattcaagaaggagcagagaagcagagactgagggatagtctcaacatgttcagtgtgtggcgggcgggcctggcgcagttgccggcacacagggagaggcctcagcttcacctgcctttttctctcacaggtttattcagtcaccatgaagctgctgctgctgcacccggccttccagagctgcctcctgctgaccctgcttggcttatggagaaccacccctgaggctcacgcttcatccctgggtgcaccagctatcagcgctgcctccttcctgcaggatctaatacatcggtatggcgagggtgacagcctcactctgcagcagctgaaggccctactcaaccacctggatgtgggagtgggccggggtaatgtcacccagcacgtgcaaggacacaggaacctctccacggtaaggctcccctgtgagccagcagctctgctcagccccgtctctggcctctcagggttccctgtctagttgggcccagggcagcctggcagcttggcagaggtaggatgaggcagacaagtctcgatgatagagtggacaggctgattctttctctctcattgtctgaatcagcaaattctgagtcttctgcagcaccttctgaccccctgcataggtgttctgaagcccttaacaaaaggcagcctggggctgggcacagtggctcacgcctgtaatcccagcactttgggaggccaaggcgggtggattatctgaggtcaggggttcgagatcagcctggccaacatggtgaaaccccaactctactagaaatacaagaattagccaggcatggtggcggatgcctgtgatcccagccacttgggaggctgaggcaagagaatcgcttgaacccaggaggtggaggttgcagtgagccaagatcgagccattgcactccagcctgggcaacagagcgagaatctgtctcaaaacaaaacaaaataaaaggcagcctggaagtggggttctcagccccccagaatcttcctcagcgccgcacttgagtcactcagaaatactgagaaaacacggctcccaggacggtatttctcatagagtttaccattgacagagtccattacacactatcccgggtgagcccacagtccctcaaggtgcaggtgagattatctgcattttataggagaggacaccgagggtcccgcagtgagtccctgcagagaccagggctggaacgccaggtctttggattctgtgttctttcttccatatcatctctgctaatcagactctggggctatttgtggcagccaaatataagtcagccagcaaaatctttatatatcgactttgttccctgtgctggtgttgtgagaaatagagaaaaatgagtcatatttagggagttgactgtcacgatggggagttcaaccaacagaggacaaagtcagcaggcactgaaatgaagcattgcattttgtgggttggacagtaattgtaggatgcagaaatgagagggggagatgagtgtgctgcagtcatcagggaaggctcgagcgtggggtgtcctccagctgccccttgaaagatgagtgcagtgtggagataaaatggacgggggtgctgggcactgtggctcacgcctgtaatcccagcactttgggaggcctaggcaggcagatcacttgagatcaggagtttgagactagcctggccaacacagtgaaaccccatctctactaaaaatacaaaaattagctcggtgtggtggtgggtgcctctaatcccagctactccggaggctgaggtgagagaatcacttgaacccaggaggtggaggcctcaaaagttgggggggaggagcggggccgggcgcggtggctgacgcctgtaaccccagcactttgggaggctgaggcaggtggatcacgaggtcaggagatcgagaccatcctggctaacacggtgaaactccgtctctgctaaaaatacaaaaattatctgggtatggcgggagatacctgtagtcccagctacttgggaggctgaggcaggagaattgcttgagcccaggaggcagaggtcgcagtgagcggagattatgccactgcattccagcctggcgacagagcgagactccatctcaaaaaataaaaattaaaaaaagggacgggggaaccacgtggcttggatgcgaacacctgagcacatcagatgctgagccagagacaagcacgcccccgtgcccccgcggggtaatgcagctgcgtgagcctcaggacccgccaggatagcagcagcatctcggggtggcgggagtccagcccccagccttagaagcgcaggcacttattttgggagcacaccaagagggctgactctcagagataagcccatgtgagaccgaactcagaaaaggcctggcatgtaggtgtagacagtataattagaagtggagctgcagatttcacaggaacggttcgtgagaagcgcttacctgctgcctcccaaggtgactgtgtgtggtggctgctggccggccatggcccacttccctgaatcttcaggttttcctcccctaacctctgtgaacacatatgtctttcaggctgagggcagtcctatggttgaggatgtgtggggctgatcgggcagcaccacagttttggcagagccccgcccttagacatttcagcttcagagaagtagctggaacccgcattttaacataatagctccctgggctattgtgatgtgcagccagatttggtacgaagcttgtatcttcaggcacacacacagaatggtgttttctttctcttttgttttgtgggggatggagtctcgttctgttgcccaggctggagtgcagtggcgcgatctcggctcgctgcaacctccacctcctgggttcaggtgattctcctgcctcagcctcccgagtagctgggattacaggcgtgagctaccacgcccggctaatttttgtatttttagtagagatggggcttcaacatgttggccaggctggttttgaactcctgacctcaagtgatctgcccatctgagtctcccaaagtgctgggattacaggcgagagccaccgcacctggccccagaatggtgttttctagaaactataccctagtgacaatattttgctttttttttttttttaagagacagggtgttgctctgtcacccaggctggagtgcagtggtgtgatcatagctccttcactgtagcctccaactcctgggctctagcagtccccctgcctcagcctcctcagtagttgagagtacaggtatgtgccgccacacctcactaatttttcaactttttgtaaagaaggggtctcatgttgcccaggctggtctccaatttctgtcctcaagtgatccgcctgccttggccttccaaagtgctgggattacagtgttagccaccgtgccctgccactttggtgacaatgattggaatcttgtcattcccaaagtttctcaggcactcatttaccgacggttgtgcttatgatgtgtaactttcctggctggctgagccataaggattagttactagttttttaagtttagggaataccttgccctcatccctagactagatgaatctacaaattccctgaaatttggacatttctgtcttctctttttcctctgggaaggctgagtaggttgctgtttagcagggcaaggcctgacctttggggtctaagcggcttcctgcccttcctgtgtttcagtgctttagttctggagacctcttcactgcccacaatttcagcgagcagtcgcggattgggagcagcgagctccaggagttctgccccaccatcctccagcagctggattcccgggcctgcacctcggagaaccaggaaaacgaggagaatgagcagacggaggaggggcggccaagcgctgttgaaggtgagccaggccaggaaggcaggagcccatctcccatctcgcccgcgtctcacaaggacccctgggctgagctgctgctgctcctcactgaatgcctcaccagtgatgaccaggatgaggttgtcggtgtcaggagcgggagcgatgattggatggataatttttgtattttgcaaggatggcctagcacattgtcagactcctgggccgtagctggcgaatgttcagagcgttggacttcttgagcggcctatggatccctttttggtctgctttttgtttcatgttgaaccacgggggcccaaccctttggcttttttaatcttttttttttttttttctgagataggatgtcgctctgtctccgaggctggagtccagtggtgcaatcatagctcactgcagccttgaccttttggcctgaagtgaccctcctgcctcagcctcctgagtagctgggactacaggcgtgcaccgccatgcccagctaatttttaaattttttgtagagacacggtctcactatgttacccaggctggtctcaaactcctgggctcaagtgatcctcctgcctcggcctcccaaagtgctgggatcacaggcatgagccaccatacctggcctactttggttttatagtttttcctttaagacctcccggaggctgcacttggcccctgaatccttcttcccctccctatcccggtatccctgatccagccacagtgggcttgccacgagctgtgagtgtacaccctgatagccctaagccccatagggccggcgtgtgctgcctgagtgtcggcacccggaatatactgtctgtgttactgcaagtccctgttttctgctgtcgttatttacttgtatggctttttttgttttttttgtttgtttgttttgagacagactttcgctcttgttgcccaggctgaagtgcggtggtgcaatctcggctcactgcaacctccgcctcctgggttcaagcgattctcctgcctcagcctcctgagtagctgggatttcaggcacgcgccaccacgcccagctaattttttgtatttagtagagatggggtttcaccatgttagtcaggccggtctcgaactcctgacctcaggtgatccaccttcctcagcctcccaaagtgctgggattataggcttgcgccaccgcacctggcctacttgtatggtttttaggcttccattgctgtttgcatccgtctctccatggaaaaggtgtttctcttggatagcaattttgatagtttccctaggcttctccgcagcatctggtgagagatggactcagcaaatgtttactgatgggttggtggatctcagtctgccccatcacacctgaattcagaacagggccgccccaggcagcaggagtgtccccaccctcagtaatagaggccctcgtctgttcttgttcctccacagtgtggggctttggttttctcagtgtctcactgattaacctggcctctctcctgggagtcctcgtcctgccctgcacagagaaagcgtttttcagccgtgtgctcacttacttcatcgccctgtccattggaacgctgctgtctaacgcgctattccagctcatcccagaggtgcagtagaacagaaacttgcgcgtcctctttccctggggcggcacagctgagccaatcccctcctcccctaccctgggctccaaggcacccaatgactgccacctgagaaatgaacctgtccctcgtatcaaagccacaaacgacttctaactctggatctcagggcccacctctcactcctctggcctctgcaggtgctgtcagatgcaaggttcttccaatttccctcctcctggggacttgacagtctcccctcccttgttaagccccatacataaggcatcaagggaaagcagcagctatcgactgccgtccatgcctttggtgctaagtacttgctctattctaaggagaaatcctggcagtactcaggtctgggcaccaagagcttatccatctggaatgagatggaaggaaaagaggttaccaagtgatatgtagaattggcctaaaaagcgagtgttctttaattttgagcaggccatcgtttctagcatagagagccaaacacagaacaaagactaagaccaaacaaaattaaaatgacaagataaatggaaggggcactcagccctttgtaccttgcatcttgacttttttctgataggactgacttcctggtaccttgacttgactgttttgaaatgttaattttgttgtttaattgttatcatagaggagctataaaaataaggcccaagttgacagtctgcccacttttttagctcaagcagggatgctgctgtggagggtgaggatacgcagacgtgtggttgaccccattagggagtcatggatgctgcccttcacaaagatcccatgtcagctgcttctcaggctttcccagtcaaaagactcacccagaaaagacagcagatgggatgccatgccttgcctgttcttcctggttgaatgtgaaccatcttggtgccatctcaaaattctgcatggctctgacaaacactttgcaggggaggcctcaacttgggctattttttcagctccagcaatggaatatattaattttttaaagatttgaaatgaaaggccttgtgacctcctggaatggaaatactgtaattgtgtgtgctccacccctgtggcctgccagggagtgtctcatcctggtctggttctgtcttgccctcttttgggcctggacagagtgtcacaactgggaaatgttcaaggaaatatttttgtgacagggtgttcctggaactctgttctttgtgcttgagcccctctcagagcacatggaaatgagcaaagaagttgagaggttaagacactgaattttatgggcattgggcatgaattaatcgttctccatcccttctgccctgcacatctggcttggttgtgtcttgcacaaagcaaaccaagtggtcgtggtgtcacccgagcctgcgccgtgtgaattggacatgcaaaagcaaacgcagcagcagagtgatcagcctctttccacctgcttgcatgtcctataaagagagccctcgagtccaaagtctgtcctggacagcctctgtgataggtctgggcagaccttgggtgtgtgacgaggcagcaccctgccctgccagtcacaccactggcaggaacgatttggggccaccagtggccacaggggcagaagtcacagggttccaaggccaccttgaattcctctttcttctgaactgattgaaggaaatttcatcagatgtgaatcactaacaaattttctatttctctctccctccctacttgtctctctctgatttttcttttttgttccgttaatatccaccaaacttttccttgcgacctccctatctgctccaccttcctcccgctaaatggtggttgctgtgcaatggggcatgtgccttctctccctgccctgggtggggctggccctccctccgcacggcagtgtggggatacggtctcctctgtgtgaccgtcatctccctctgctccctcctgggggccagcgtggtgcccttcatgaagaagaccttttacaagaggctgctgctctacttcatagctctggcgattggaaccctctactccaacgccctcttccagctcatcccggaggtatggcaagccagggccttcaccccggagcatgccggcgggcacagtgggaggacctccgtttggatagaaggcatagagagggcacctggaggccctttccttttggaaagcgaagctagaacttaggcgtgaactaggagaggcagcccagcataggctgaagagctgggttcaaatctcagctctgctatcagtaggttccgtaaccccaggcacaccactgacctcacactgcctctgtttcttcagatgtgaaatggggagagcaatagaccggcctcaggatgatgttgtgagggtggaacgagcgagtctgctgcagcactgagtgcctggtgcggaaagtgctgtctgatgtggggtgaaaagatgcagtgtagcgagctcactctggcttagttgtggtgctcagattaaggctttgggtgcagagaagtttaaaaaacatcatcagccgggtgcagtggctcacacctatattcccagcactttgggaggctgaggcaggtggatcgtttgaagtcaggagttcaagaccagcctggccaacatggtgaaaccccgtctatactaaaaacacaaaaattagccagacgtggtagcgcacgcctgtaatcccagctattcgggaggcacaagaatcacttgaacccaggagatggaggctgcagtgagccgagattgcaccactgcactccagcctgggtgacgggagtgagactccgtctcaaaacaaacaaacaaactcccacatcatcagaacccacagttctcagtaaaaagattgtccatagggagttttggggcaaaggcaatgcaagtcaaacaatgtctggttttatataccttgatggtacctttgcctaataagttcatgagaaaacttgccacaaaagaaggagctgatggttcatctaatttggtgtaatcccctcagcagacccattaattacaataagcacaggacgtctccctgtgggtggtctcgcaggcctggacagagccgcagttgaagcagagatgactgcatgcgcctcttacaacacttggtgttttctgaaatgtcagttggctccctcctagtggatccttaggttaactccatggcatcgatagaacaagtaacgttttaccacgttggaatctgacctgcacaagagcgcatatccctgagtcgagaacccagcttttgggatttctgaagctcaaccccatgattctgtattcaccatcctttgtggctttttgcagagaagtgttcgttgcctattttcacttcacttttcccccaagatgattcgactcccctggaaagtcaacatgaaagtgttgtttccctggagggtggtgattcaatttggcctgtttaaaacataaaggcaacaaacagcccagagttccttgaagttgggatcaacttttattttggaccaattcatgagagggctgaagtttattcaaggcccgtttcccatcagaaaatggaggaacaacccggtaaatatatatacttcctatgtacccacaaaaaaatttaagaataaaataggagcaagtcgttagatacttttttttgtttgtttttgagacagtctcactctgtcacccagactggagtgcagtggtgccatctcggctcactgcaatctctgcctcctgggttcaagccattctcctgcctcacactcccgagtagctgggattacaggtgtgccaccaggcccagctaatttttgtatttttttttttagtagagttggggtttcgccatgttggccaggctggtctcaaaactcctggcctcaagtgatccacccacctcggtcctttaaagtgcatgagccaccgtgcccggccaggtcattagacacattcacaagaacccaccataaatcaggagcttaccctaggacagaattctcttgatttctactcctgtcctcttcccagtggattctcccctccctctttgataagtgacagtttcagaaaggactcaaaacaaaacccaaaaattgacgctcgcaataacacagtccactttcttggttctgtggtcactgggaggtctgcggttaggaaaacgctgcagttcttattacttaactgggaaatgggtttcccgttttagaaagtataattacaccatctccctttgtgtttacaggcaggtcagccaggaacactagataagatgaaaataaatacaagtgtctgctccttcaatatgaaatctattggcagagaatgccttcatagcaaagcaccaagataaatcaaaagtggaaaaccatatcggaggtttttctttctgggattaaaattctacagatgatcagtcttttgcatcagcaaataagcttgagaagaacctggcaggtttagtgatgtcacatcagggaaacaccaaggactagatttttgctggaaagaggatgggtagacggcagagttactccattatgcctctctcctttcctagagtcaaggaagtagttaagagataagagggggatcagtaaagatgctttattttctttaaaactcattttcttttcctgggtccacaggcatttggtttcaaccctctggaagattattatgtctccaagtctgcagtggtgtttgggggcttttatcttttctttttcacagagaagatcttgaagattcttcttaagcagaaaaatgaggtgaggcccaattgttgctgaagaaagctcttctagggaaaacacccatctcaaacaatgttgatgtattgtggtggtggtggtgatggtcttagcccaatatcacaatttccgtgaaactctaatttcttgaggagacaatcccatttcacctcctgaggatatttggccagaagtgaggccagaccagaaactagatctggccagggtgccttctactaagcagtagtttatcccctttgttttgttctaagattatttccttaatatatttgtatctttacaggatggggagaagagcttgataccatgcattcattctgtatgaagtatgaggctgcagagaaacaggactattatagtacagtttcaaaaagatatctttagtggctggcatgcagttattccctaaatagctgctgaattgagtgagattagccattgcaaaagaggagctctaaatatttgagcagtggctgccttggtggaataagcatgtaccccgaggagacagctttgatatctgtctgacaccaggtccttcgcacttggtgcagatttatatatatagatattagaaacggggtctcgcttcgttgcccaggctgctctcaaacttctcagctcaagcagtcctcccacctcggcctcccacagtgctgggattacaggtgtgagccaccgtgcccgaccatggctttatataatagcttttgctatgtttctgggcacgtgacctgcttgtgtcatcttcgatggtaaggctgaggtcttccagtgtgtgaagcacttccttggagcaggtgctcaatcaggtttgtggttttggtgaatgtcatgctgatccctccctgtcacccttccagcatcatcatggacacagccattatgcctctgagtcgcttccctccaagaaggaccaggaggagggggtgatggagaagctgcagaacggggacctggaccacatgattcctcagcactgcagcagtgagctggacggcaaggcgcccatggtggacgagaaggtcattgtgggctcgctctctgtgcaggtcagtgggccaccagctgcttggtggagcctctaagaggttgactcaggcttaccttgagggcacatggtccagcctttgacgctgtgggccctgggggtgtgctttctcctaggacctgcaggcttcccagagtgcttgctactggctgaaaggtgtccgctactctgatatcggcactctggcctggatgatcactctgagcgacggcctccataatttcatcgatggcctggccatcggtgcttccttcactgtgtcagttttccaaggcatcagcacctcggtggccatcctctgtgaggagttcccacatgagctaggtaagcgtgcgtcccccgttccactggtgctcccttgggtggtggtgtaggcccccttcctgtggccggttccttgctcccatctccctgtcttcacagtgcttattgtaactgatttaacacactcctaaagcttcatggaccctaatcaccttttttttggagacggagtctcgcactgttgcccaggccggagtgcagtgatgtgatctcggctcactgcaacctccacctcctgggttcaagcgattctcctgcctcagtctcccaagtagctgggattacagacgcctgccaccacactcggctaaattttttttttttttttggatttttagtagagacagggtttcactacgttggccaggctggtcttgaactccttacctcgtgatccgcccgcctcagcctcccaaagtgctgggattacaggcttgagccaccgaacgtggcctaaccaccatttcttaacgattaaatagataatttaaaatgatggggtttttacaggggtgtttgtttccttttagccccatatgcagtggctcagttctcacctatacagtggggttaataagagcacctccttttagaataatagtgaggattaaaggaaaacaaagggtgagagggacttcccatgtgccaggtgctattctgagcactcagtaaaggctctcttttgtagcctgttaatcttccaaaggctcaggtgcctggcaggtgcatggcagctggatgaaccagggggtaggagggacttagtttgatcagagggagagtgtaaaaagctagtaattactccagaggctttagggacgacgtagggtcaagttctggctttgccatatattgacttgtgacttcgggcaaatcacttctcacagtctcgacacttaacttctcgcagttttgattttgtttccatggtagttgtgaggaagggggttccttctgtttcactatgaatccagagagaaatgaggaggccagtgccagctggtcatctatttttaaaatcctgagaaagattttcagcctttaggctgggtatacggccagtttggcaaatggagacgggtcctgaacaggaagttcaagggcctgtcttgtcacttctgtcttgagtctagggctgtcttgatttttttcacccacacttttagcagtctgatgtcatcggtgccctctgtctcccacgaccttgtatgactggctctcactttgtcgccaggctggattcaaactcctgagctcaaacagtcctcccagctgagcctcctgagtagctgggatgacaggtgtgcattcaccatgcccatcttactcttccttcctcgtccctccccttttcattctcgctgctgtaggagactttgtcatcctgctcaacgctgggatgagcatccaacaagctctcttcttcaacttcctttctgcctgctgctgctacctgggtctggcctttggcatcctggccggcagccacttctctgccaactggatttttgcgctagctggaggaatgttcttgtatatttctctggctgatatggtaagtgttccacagttcactggatgagagggcggctaaggggatggatgttaggtaggtagtttttttttatttttatttttttgagatggagtctcactctgtctcccaggctggagtgcagtggcatgatctcagctcactgcaacctccgcgtcccgggttcaagtgattcgcctgcctcagcctcctgagtagctgggattacagacgtgtgccaccacgcctggctaatttttgtatttttagtagagatggggtttccccatattggccaggctagtctcgaactcccggcctcaggtgatccacccgcctcggcatcccaaagtgctgagattacaggcatgaaccaccgcacatggctggtagtttgtttttaataacatcttccttagctttctttcacataccacagagttcgtctgtttaaggtgtacctaccattcagcggtttttaagggggcattagattttaaaggaggaaaagtttatgtttttgttagcatatgtcattaaagaaaatgattataatttatctatggtctttattaattattatggaatggctgtatatagataagagacagaagaaaggaaagaaaattacgcataatcatacatcatactacccctaaaacaataatagcaatactttggtttgtttctttttttatctcaatgcattgggtgtgtctttttctttaattttttttttttagacagaacctcactcacctagcctggagtgcagtgtgtgatcataggtcactgcaaccttgaactccggagcttaagtgatcctcctccctcagtctcccaagcagctaggactacaggctccagccaccatgcccagctaattttttgaatttttatagaatggggtctctatgctgcctaggctggtcttgaacttgtggcctcaagggatcctcccatctcagcctctcaaagtgctgggattataggtgtgagccactgcatctagcttgttaataatatcttgataacaaaaagacctcttaaagtgtttaaagtccataataaggccaggcatggtggcaggcacctgtggagctactcaggaggctgaagtgggacaattgctcgagcccaggagtttgaggctgcagtgagctatgttcgcaccactgcactcgagcctgggcaagagcgagtggaaaaaaggaaaaaaaaaagtctataatataaagtttattttttatcagagtacatttatttttagccagcctctaaactcatccagagccacatacacgttgagtactttgttttacctagacagttgtaaagacatggtacctgctattgttaattttctttttttgttttgttttgttttggagatggagtctcgctctgttgcccaggcgggagtgcagtggtgtgatctccattcactgcagccttgccttccgggttcaagcaattctcctgcctcagcctcccaagtagctgggactacaggcctgcgccaccacgcccagctaatttttatgtttttagtagagacagggtttcaccatgttggtcaggctggtctcgaactcctgacctctagtgagccgctgcacctggccctgataattttctttgtcaaccaacctgatctatatctccatcactgaattgccctggacttacaagatgaagaaggaattgcagctgtgttgtttcttgcttctttcccagttccctgagatgaatgaggtctgtcaagaggatgaaaggaagggcagcatcttgattccatttatcatccagaacctgggcctcctgactggattcaccatcatggtggtcctcaccatgtattcaggacagatccagattgggtagggctctgccaagagcctgtgggactggaagtcgggccctgggctgcccgatcgccagcccgaggacttaccatccacaatgcaccacggaagaggccgttctatgaaaaactgacacagactgtattcctgcattcaaatgtcagccgtttgtaaaatgctgtatcctaggaataagctgccctggtaaccagtctctagctagtgcctcttgccctctcctcacctccttttctctcagtgactctggaacctgaatgcagcttacaagacaagcctgacttttttctctgattaccttggcctcctcttggaaccagtgctgaaaggttttgaatcctttacccaacaatgcaaaaatagagccaatggttataacttggctagaaatatcaagagttgaatccatagtgtggggcccatgactctagctgggcaccttggacctccagctggccaatagaagagacaggagacaggaagccttcccattttttcaaagtctgtttaattgcctattacttctctcaaagagaacctgaagtcagaacacatgagcagggtgagaggtgaggcaaggttcatcctgaatgggagaggaagtcgaaccactgctgtgtgtcttgtcaggatgctcacttgttcctactgagatgctggatattgattttgtaacagcacctggtgtttcacggctgtccgagtgagctaacgtggcggtgtggctgcctggacctcctctttcaggttaacgctgacagaatggaggctcaggctgtctgcaagaaaacagttggtttggctgtgattttgacctcctcttccccactgccatcttctaagagactttgtagctgcctcctagaagcacattctgagcacatttgagacctctgtgttagaggggagactgcacaaactatcctcccccaggttgagacgtctgcagagtggcaagctgacttgtagaaatggggtgccatttatgctctacttagacaagggtaatcagaaatggaatcagtgcaggcaaaatttaggatttgccgcttccataaatcaaagcatgactaatagggggtctctgaaatgtaagggcacaaacttcacttagggcatcgcagatgtttgcagaatggttggcctaatgattatgctacagatgggttttaaatgacccgtctaggttactgcttccttgcaaaaaaagtcgaatcctgcattgaattgaatatgaatttctctaactctctccagaaaatggatggagataacttgtctttaaaactgtaggccagccttagccactgtggagcccttgcctccgagctctggcttcaaggggagctcttctccaggttcactaggtgaattgatttattattatcatattgataatgtgagattctttagccactttggggagcctgtctctccagaagcctttcttagtggtgcccacagttggagcccaggggccatgtttgcaaactgattcatgtgcatggctgacaggagtactggttcactaccaatgcctgagcttttctcttacatagaaaaactgtccgctctcagtaatcacaagcagcatccgttttgttttctcttcttgggagacatctgtcaaaccaggaatattcttgaaaagaacgtgagcaggaaaaactgctggtgatactttttttaagttttgtttttatcttgcctgttggcttcaatacatttgagaatacgctgaagagggaaaatttcagtgatggagattctagattaaatatcaggactgatttcctggtgggattatggtccagttttaccaaagaaccaattccttgaatgttggaatctaactttttatattgtcattattattgttgtttttaaacggttctttgtcttttctgttttatttttctcaagctgctttcaggagctagcagaaaataactcaaagttgaagactctggaagattttgctttaacctaactcgcattgatgtattaaatttataattttagcattcccaatagatcctatcattccttaaacataataccctttgtcttggagtagaatactaagttagagttagtggatttctagtttaggagaggagctcaaaactataatctttaacaaattgaaaaatgaaatagggtgttttccctttttgtgcacacctatattaccttaagaaatttccttccatagacagctgcctcaaagggaaatcctctttaaaccgtagttggcgcagaggtcagtcctagtcggagcttaggaggggcggagacgctcacatcgtctgacttgagtcgccactgattgtggcaacagctttgcctcatgagtcaaaaattggcaatttcttttgatttttagttgttgaatttgctgtttcaagcatttgtacatattagaagtctaaggagtagcaagtcagtgggaggactttttcacccctggcattagcagcttcgacctcattttccagatgcaccagctcctattaataagttagcaaggaaagtgtatgtcacgtgcaggaacagtgaggcagggacaggggttctgctccttctcacttcaccaccggcacacagcttgcccctgtctttgcccccaaaggtattttgtgtctagtgtcaaattggagctattcttcactggtccttaaccttgggttttaaaaagaaggcttctctgtttgggtagcgtaagagctgagtatagtaagtcctcttccaaagagatggcaatatgctgggcatctactttaaaacaaagttgtctgatttttgcaagagaggttaggattttattgttcttatttccctttacagttctgcagttccatcacagtatttttttaaataactcaggtgtatgagaagaaattagaaaagaaaattaacttatgtggactgtaaatgttttatttgtaagattctataaataaagctatattctgtaattgttgagaatcccacgggtgatcatttgcaataaatgtggatgtaatgaaggctgttgaacacaaggtggcgatggtgtctcactgacgtacaaagttttgttttaccaggtctggtttaacatttgactgggattttagaaggttttttttgttgttgttattgagacagagttttgctcttgtcgcccaggctggagtgcagtggtgcgatctcggctcactgcaacctccacctcctgggttcaagcgattctcctgcctcagcctcccgagtagctgggattacaggtgcccgccaccacgcctggctaaattttgtatttttagtagagatggggtttcgccatgttgtccaggctggtctcgaactcctgacctcaggtgatctgcccgccttggcctcccaaagtcttgggattacaggcttgagtcattgtgccaggccaagaaggaaacttttgtactctcttctcttttctttctttgagacagtctcactctgtcacccaggctggaatgcattggcacgatctcggttcactgcagcctccgcttcctgggttcaagcgattctcatgcctcagcttcctaagtagcttggactacaggcatgtagtaccatgcccagctaatttttgaattttgttgttgttgttgttttgtttttttttttttgagacggaatctcactctattgcccaggctggagtgcaatggcacgatctcggctcactgcaaactccgcttcccgggttcacgccattctcctgcttcagcctcccgagtagctgggactacaggtgcccgccaccacgcccagctaattttttgtatttttagtagagacagggtttcaccgtgttagccaggatggtctcgatctcctgacctcgtgatccccctgcctcggcctcccaaagtgctgggattacaggcgtgagccactggccatgatttttgaatttttaatagagatggggttgcgccatgttggccaggctggtctcagaactcctgacctcaggtgattagcctgcctcggcctcccaaaatgctgggattacaggcatgagccaccgcgcctggcctatactcactttaattggtttctctctctctctctctctctctctcatctatcttcctatgtagatagataactgttatctacagataaagttttatatctatctagagagagagagtgagcttgaactcccaggctcaagcaatcttcctgccttaaccttttgagtagctgggactagaggcgagcactaccatgcctgattaattttttaatttttttttttttatagaaacatcttgctacgttgcccaagctagccttgaactcttggcctcccaaagtgctgggattataggcgcagatcaccaagcctggccaaaatcgattagtttatctctttcggaggctgtgatctcactgtgttgcatgatagaagaattgtggtgtttccaagaagacttttctatcaccctgttttctcttacataaacttgaaacttgtaacgtttgcttagtttgtttaagccacatttctatatcttacagggaaaagtcctctgtcaatgcgacttaaaatgctaaagctattcccattccaatttagttgtagggtcagggatctgtttttcttcgacaacagaaatgaccagtaagataaaaaaaaagttggttcaatcttatgactacctccattagagattttcaaatgcctgttagtccttcctttgttaaaacaagaataatatatgaagtggctcgtgttggtcgtttaatttgcattacctcactactacgccatttgctattcaaaatgacattcacactgcccttcagctcctgacacctcgacgtccttttctgcctacagtccctcctgcctttccaggagtctgtctctgcatacctcagttacaggacttgcattgtaattgctgttctttgcataccaaattccttctgggtggagggcgtatctggtttctttctgtgatgtcagcactggccatatggaaagaatgaatgaaaaaactaaatgagccaggtgcaatggctcacgcctgtaatcccagcactttaggaggccaaggcaggtggatcacttgatgtcaggagtttgaggccagcctggccaacatggtgtgaaaccctatctctactaaaaatacaaaatttagccgggcatggtggtgtgcctctgtaatcccagttactcaagaggctgacgcaggagaatcacttgaacccgggaggcagaggttgcagtgagccaagatcgtgctactgcactccaacctgggcaacagagtgagactccgtctcaaaaaaaaaaaaaaaaaaaaaagactaaatgaaatgtcttttaagttctgtgttggtggagatgctcactttccatggtgagcagttcctgttgtgtcttccagtcatcagtgatggtttcgcttatgctttattactcggtccaccttaatttagaaatgtaagtttgagagaggtgtacttgtggcccacgtggaacagagctaagcaaagtaaacaggccattaagtagattaaaaccgtgaccttagccatctctttgtaatactcttaatcagctaagccatctaggacatttttggtggaaggtgaaataactgaaattcaaaaaatgctatgagtgttctctcctactttcttccttctgtgcactttaccattcagtgatgcttggattggatttgggcaaaacccacttcaagaaatagcaaacacactaaatgtggacgtagtgtttttgatgcgtgggaaaacattgcattcgtgattggtggctttcggctgacttttttttttttttaatagtggaaaaaaaatcagtggttgggagcgatccacaggtcctttatcagccttcagctaagtatgcttagaactgccagccaaaaaacagttgtatttcttttcagcagatgtctattcttgccagatgtcttttcaggagttttttgtttttgtttttgttttttaatgaaggaagggagttaatggagtatcctttgtaacagcaatccttgatccagcagtgggtcagattccaagatggtagcatcaattatggttaaggaataatcccaaagtgttctgaccctggcaatcataagccaagaagttcttctactaggctctagatggtttttgttttttttttgtttttttttgagcagagttttgctcttgttgcccagcctggagcacaatggtgcgatctcggctcaccgcaacctccacctcccagattcaagcgattctcctgtctcagccttaccaagtagctgggattataggcatgagccaccaagcctggccaattttgtatttttagtagagatgaggtttctccatatgggtcaggttggtctcgaactcccgacctcaggtgatccgcccaccctggcctcccaaagtgctgggattacaggcgtgagccaccgcgcccggcttgtttttattttattttattttgagacagggtcttgctctgtcactcaggctagagtgcagtttctcgatcatggctcgctgcagcctcaatctcctgggctcaagtgattctcccacctcagctcccaattagctgggggtacaggcatgcgccaccacacctggctaattttgatttttagtggaaaggaggtctcgttaagttgcccgggctggtctcgaactccagggctcaagcaatcctcctgactaggcctccgaaagtgctgggatgacaggcatgagccattgcacccagactctctagatgtttttctacaaccggtttacttatagatttgtggaacactgaggttccctaagaataaactcaggcaataatccacacaggttttcacaaatccattcgtgtgacacaaagccatcaggaatctcccagaggaggctcctgaacaaggagtttttttgatgaagtaattctaaatgatatgctctctctctttttttttgagatggagtctcactctgttgcccaggctggagtgcagtggtgtgatctcagctcactgcaacctccgcctcccaggttcaagcaattctcttgcctcagcctccgaagtagctgggatttcaggcatgtgccgccatgcacagctaatttttgtgtttttagtagagatggggttttcgccatattggccaggctggtcttgaattcctgacctcaggtgatccacccactatggcctcccaaagtgctaggattacaagcatgagccaccacgatcaatgtgctctcttaaaatatggtttgttggggccgggtgcagtggctcatgcctgtaatcccagcactttgggaggccaagacaggcggatcacctgaggtcgggagtttgagaccagcctggccaacatggagaaaccctgtctctaccaaaaatacaaaattagccgggtgtggtggcacaccctgtaatcccagctactcgggaggctgaggcaggagaatcgtttgaacccaggaggcggaggttgcggtgagctgaggtcacgccattgcactccagcctgggcaacaagagaacaagagtgaaactccatctcgaaaagaaaaaatagggtttgtcttcctgcgtttggctaacattttaaatgcatcaaaatcaaagaatgacccaagctaattaataggacattcaccccaaaatttgatgtcaacctttgggttttaagaaggaaaacaactaattcaataaagggaatcattttcttgcttaaaataaaggattaggtctttaattataaatgctagtaaggaaaaaaaaaaaacctctttgatcttgagtatcctcccagaataggcgattctttcaagtggcatcttctctataacttcttgaagtttataaaaacaagctcttttgaagccattgtctggttgtattctatagatgtggcccttgaagtgaaatatcttacgctgccaaattcacacaatttaagcatttagtgattctgcaaatattgtaggattctttccccctcttgaaaatcaagagaacaggagagagagatggaatttacatttttcttttctgggaaagctgatttaaacaaagggatcatactgatttttcagtatacatgattcagtgaactagtctaactaaaagggtggtaaaatctaaacagactgggtgtggtggctcacacctgcaatcccagtgcattgggagattgagacaggaggattgcttgaggccagtatttgagaccagcccaggcaacagtgagacctgtctctataaaaaataaaaatctggcctggtgcggtagctcacgcctataatcctaacgctctgggaggctgaggcgggtggatcacctgaggtcaggagttcaagaccagcctgaccaacatggggaaacccctgtctacgaaaaatacaaaattagctgggtgtggtggcgcatgcctgtaatcccagttacttgagaggctgaggcaggagaatcacttgaacccaggaggtgaaggttgcagtgagctgaaattgcgccattgcactccagcctgggcaacaagagcgaaactctgtctcaaaaataaaataaaataaaaatctaaacagagatctcaatatcatctttatctggctttaaggtatattcccacaaatctgtttttctaataatgctcaacttagcttagtagaaaaattttgtgttcctcggttcatatgttctttttttttttttttttttgagactgagtctcactccattgcccaggctgtagtgccgtggtacgatctcagctcactgcaacctctgcctcccgggttcaagcgattctcctgcctcaccctcctgagtagctgggattacaggcgcatgccaccacacccacctaatttttgtatttttggtagagacagggtttcaccatgttggccaggctggtctcgatctcttgaccttgtgatccgcccagcctggcctcccaaagtgctgggattacaggcatgagccactgcgccaggccagttcatgtgttcttttaacattttgtttgaaatggaggctgactgcatggaagactgccttgatctaactgatgattttgttttttcactgaaaaacttaaagcagccttgtaaactagtttaaatgggagaatccttggaaaagtgttgatgtttggtaatttttgagcaaacgaaggtaagaaccaatgcaaacttacttccccagagttctgcattgtgtctttgtcttgaaaaagaacacagaatggccaggcgtggtggctcacgcctgtaatcctagcactttgggaggccgaggcgggtggatcgcaaggtcaggagatcgagaccatcctggctaacacggtgaaaccccgtctctactaaaaatacaaaaaattggctgggcgtggtggcgggcacctgtggtcccagctactcgggaggctgaggcaggagaatggcatgaacccgggaggcagagcttgcagtgagccaagatctcaccactgcactccagcctgggcgacagagccagactccgtctcaaaaacaaacaaacaaaaaaagaacacaggattttgcatccataggaatggattcatgtcaattccatcattgactatctgtgtgatctctaacatgtttaacctctctgcacctcaatatttttatgaagtagaaattataattttatactgcctaccttataaggtaggtataagtataatgagaagtaaatatgcaaaatgttttagaaattaaagctctgtactagtagtaattaacattttgttctttggattcctttgagaatctgaaaaatacatgattgctcatacacactcatagcatgtgtaaatatactccaacctttaatttcatttataattgggagcagcatggggatgggaggtagacgagaagggaatgatctcctgaagcccctgtgccccaggtgaaaaacttctgctgcagacaagagtaagatgaaatccattcattcaacaaattgttgagctccaactctgccaagcttggcatgacatagcagtgaaagatccttcccttaaggagtgaggggaaataaacaaaaaccaagtgctacagataaattaacacgggggagtgaggtagggaatgggcagacagggatagaggtgatcaggaaagggctctaaccagatgacatctgagttgagctttgtgactgtagaagaatgttctaagccaaagggccggccaacgcaagaatgctgagacagaaataagcttcatctatttgaggccagtatgtgtaaacagcagaaacaaggccagtctgtctggactgcagcagacatgagggaagaaggttggtgggagctcaaagttgacaggagtcagaccacttcgggaaaggagaagacatttgtttttgtttgtttgttttagagatggggtcagaggtcactgcagcttcaaactcctggactcaagagatcctcccacctacctcaaccagcctggctaatttaatttttttttagagacggggtctcactaagttgcccagtctggtctccaagtcctgggctcaagtaatcctgctgcctcagcctcccagagtgctgggattacaggcgtgggccatcgcccttagaccacaagagagttttaaccagaggaatgacaaatcagttttatgctttaagtttagaaagatctgctgtataggaaaatagacggtagggggaggaagttgacaggatacagtgtgtggaaaggcgtccctgattctaaatttttggtccaagcaacttgaatgccagtgctgtttaccttggtatcttacctgtggaaccaccaaatgtgttatgtactggttgccaccattttctcctgttctgcaatgatgcaaacaacaacagtcacaagcaggaagtgacggcagctttggggctcccaattctttttttttcgttttggagacagggtcttgctctgtcgtccaggctggagtgcagtggtgtgatctcggctcgctgcaaactccacctcctgggttcaagccattctcttgtttcagcctcctgtgtagttgggattacaagcctgtgccatcatgcccagctaatcgttgtgtttttagtagaaacaaggttttaccatgttggccaggctggtctttaactcctggcctcaagtaatccgcccatctcggcctcccaaagtgctgggattataggggcgagctgccgcagccggtctgggactcccaattccctcttttttttttttttttgatggagtctccctctgttgcccaggctggagtgcagtggcgtgatctcagctcattgcaacctctgcctcctgggttcaaacaattctcctgcctcagcctcctgagtagctgggactacaggcacgtgccaccacacctggctaattttttgtatttttagtagagacagggtttcactgtgttagccaggatagtctcgatcgcctgacctcatgatccacctgcctcagcctcccaaagtgctgggattacagacgtgagccaccgtgcctggcctatatagtgcttttcatataaaattgcagattatacattataatataccttttgttttgtgtagctattttagaaatgctcattttactatggtttttaaaatattctacagttctcttacctgcatttaacacagaagttgaacatttaatggcttcatataaatagaaactgacgccaggttactttcacacaacagtggaaacaagggttccctgtgcttttgttaaattaaaagtgttcataattatgtctcagaggagctggtcattaatcaaggtttaggaagcgcttagggagtttcatgaggaaatacaccaaagctcacaagccctgtaagaaggaaacccagatttgaagaaatgtgtagaaatgatagttaaacatgaatcttggttatttcaaatatttatgtcttctgactgaccaatgcagaaaataaaaaaaagtggggggatacaaaattcaccaagtggacatctggccaggtggagagatccaccagctgaatgaaattgggctctccaatgattcttgagaattgttaatgtctaaaaacaccaccacacaagcaatgaacttaaacctaatttgttatggaaaacaattgtttgggaagggagctcaattagagctttcttctttttaaattttcatggagtggctctagatgttttgtttgtttttgttttaatcagaaaagacattgagaaagcaatgaatgtttaactctattggaactaggccactaaaagaaaagagcagccggcacggtgcctcatgcctctaatcccaacactttgtgaggccaaggtgggaggatcgctttagtccaggagttccagaccagagtgggcaacataggaagaccccccatctctaaaaaaagaaaaaaatagctggacatggcagtggcatgcctgtggtcccagctacttgggaggctgaggttagaggatcacttgagcccagggagatagaggctgcagtgagctatgatcatgccactgcactccagcttgggcgacagagcaagaccctgtctcaataaataaacatataaataaataggtgaagataaagaaaagtgcttccttctttttctttcactctgtctctctttctctctgctccttccctcccttctctctctcttctccctccttcctttttctctctctctctctctttttctctctttctttcttttagaacagggtcttgctctgccacccaggctgtagtgtggtggtgtgatcatggttcacttcagcctcaactccctgggtccaagtgatcctcctacctcggcctcccgagtagctgggaccacaggtgttcaccaccgtgcccggctaatttttttttttttttttttgagatggagtcccgctcttgttgcccacgctggagtgcaatggcatgatctcagctcactgcaacctccggctcccaggttcaagcgattctcctgtctcagcctcccaagtagctgggattacaggcacccgccacaacacccggctattttgttttttttttttttttgtagagatgggttttaccatgttggacaggttggtctcgaactcctgacctcaggtgatccacccacctcagcctcccaaagtgctgggattataggcattaaccatcgtgctcggccacctggctaatttttaaaaaaaatttttggtaaagatggggtctccctatgtcattgcccaggccggtctggaactcctgggctcaagcgatccttgtgcctcagcctcccaaagtgctgggattacagtcatgagcctctgcacctggccttattttcacctatttataaagcaatactttctcaccacagaaaattggaaagataaagaaattttttttattacaccaccaagtgatggctactgttcacatttttttccttgatagattatgctcagtgagggtatgaattatgtcagttttggttcgtttccatatccttaacacagtgcctggcacacagtccacacctaattcatacttgttgaatgagtatattaatattttcttgaggtcttttatttttaaagaaatggagtcttgctatgttgtccaggatggagtgcagtggctattcacaggcaagaaaatagtgtaatatgacctcaaactcctgggctcaatagatcctcctgcctcagcctcccaagcagctgggactacaggtgaataccactatgcctggcttaagacttttattttatgctttttttttttttttttttttgagacagggtctcactctgtcaccaaggctggaatgcagtgatgcgatcttggctcactgcagccttaacctcagagaccgcccacctcagcctcccaagcaatcctcccatctcagcctcccaagtagctgggaccacaggcgcatgccaccacacctagctaatttttctgtattttttatagagacgcggtttcaccatattgcccaagctggtctcaacctcctgagctcaagtgatcttcccgccttggcctccaaagtgctgagattacaggcgtgagccactgcactcggccatgtttatgtttttgtttttgtttttttagatggagttttgctctgttgcccaggctggagtgcaatggtgccatctcagctcactgcaacctctgccgcttgggttgaagcgattatcctgtctaagcctcccgagtaactgagccagccatgtttgttaataaaaatggggacaatactgtatatatatggttatattttagctttttcacttttcagtatctcctgaggcttttctcatgtcattaaatatttttctaatttaaaa

SEQ ID NO: 101 - DNA, 33259 bp, Homo sapiens
agaggaagctctttcgcggcgctacggcgttggcaccagtctctagaaaagaagtcagctctggttcggagaagcagcggctggcgtgggccatccggggaatgggcgccctcgtgacctagtgttgcggggcaaaaagggtcttgccggcctcgctcgtgcaggggcgtatctgggcgcctgagcgcggcgtgggagccttgggagccgccgcagcagggggcacacccggaaccggcctgagcgcccgggaccatgaacggggaggccatctgcagcgccctgcccaccattccctaccacaaactcgccgacctgcgctacctgagccgcggcgcctctggcactgtgtcgtccgcccgccacgcagactggcgcgtccaggtggccgtgaagcacctgcacatccacactccgctgctcgacaggtaggcagtcactggggttccctggaagagccctcaactcctgcatcccctcaagccccctgacaagcgggctctagagcccaaatggcagtgaccgcttggggccggcctcacctcgtcacctctagggagcccttcaagcttgggagatagggagcacccacccttcaagctctggcaccgtagggagcacaggcttctctggagatgcagcagttgcattcctccacacatctctccattaccctttctctccttccctcttactcctaggcgttctggctccgtactccaaaaatcagcaatcactgcctaactctaaacgctgggtttactgaaattgatgtgtgtttatatatagtgggtgtgggttttgtttgctttgttttttccttatttttgaaattgggctgtagggctgcactgtccagtaggtagctcttagccacaggtggctattgagcacttgaaatgtgcccgtccgaattgaagtgtgacctaagtgtaaaataccagagttcgaatgcttagtatttattaaaaaaagaacttataatattttattatttgtttattgattatatgctgaaataacatttttgatatcttgggttaaatataagattaaaattcattttatgtgtttctttttactttatgtggccacgagaaaattttaaattgtatgtggtggtgttcacattatatgtttattggaccgcactgctttagaatcaaggatgttttgcttcttattgtttttattttggttttggtttattatgtgttgtcaggaacgttttatatcaaactcaatactagcagttcagtttctcccagtctcagtttctctcacagggaagattaagtagaggaaatgtgtgctatttttgccacaataaattgaaccaaaagactgttaaatggccagaaattgtaaatggctttcacttattggtttgtacaggttttaagggaaggttagcattagtttctgttttcagaagaacattacaaccgcgtgccatagacctgtgactgtgtattagtcaatgggtcactagtcttgtgtattttacttcctacagggatttaactaggcccagcattcagttcttagtgagttaacatccatgattacaacattctcttctcctcctcctatatctaatgtgaaaatacgtcatccccgatgcctgattggccagaagctgtgagtatccagcatcagataaattcctcagcttccgccctgccaaagttactggattttcacctgcctgtggcttttcttcattgtctctcactgtcaggcttcgatggcctaaatggcacaggagatttgggacacttctagagcttgtttccacttcttgtctatcataatccagattcagtgatatacaaggtgtggtgtctgtttactccaggccttatattctgtggagcaagtgctggacaagtgtgtatatgtgtctgtagtcaacttttaagggtggtggttggttagagagggtggatatatgttagaaccagttatgcaaacactatatggaaatgtagcactgatggacccattaggtattgaaaagccaattgatcctcccactttgggtgctgcttctcaggattttgatttatctaagctttgtgcagtttggggaccaagaagtgaagagggagtttccttcccatactcatgaacaattttcatagtctaaaattcttcactgaattgggtaggaaattaattctgtcttcgaggaagccataagaccagcgaaacactctggcatttactgcatcacattcttttctccaatttgttacttaagatcttatcattgcagtatttatgtagtctgagcattagatgaggctatgcagttgactcactggtgtctctttcctcacttataaaatacgaataataaatacatgtgtttctcggactatggagaacaatgtttgcattgttctttgggatgacctgaaaaaaaataagtttatgcaatgttacatgctcttattttaatgactggtgaatcagtctccataacctgacttctatccgatgagtggaccttccccaacaatcttcccaccccttatgagtaatgagtccaattggttgttcaaataccctgtagatgacataacttttctgattaaatttttgagttaattttggtgatgtgactatggaagctgtactttacacctttattttcaaaatgtaaaaatcaatttttaaaatcttttggctttaaaaaaaatttcccactcactcaatcttgccaaaaatctaccttcaagaactttcctactatattctttgatcaagcaatagggtagaaagaatgcaggctttaatgtcccatgattgcaattcaaatctgacgccaaccctgccacttattagtgtgaccattagaaaagtattaatttttctgagccttagtgccctcatttataaagtggagctaatgaaactatgtttagagggtgatcttaagatgctagtgcatataaagtgactgacatgtaatagggtcacagtggaaagaagaatgcctcttaatgggaggaggaaagagtgtgtgaagtgtcactgagacttctgcagcatgcactctctattgttcttagtatccaggaatcttcagggtcatcctctattgttggcctaaatctcttggggcagatatggaactatttccatctagggaataaacatttaattaaaatgggtctcacaaactgatactggtttcctagcagttggagtattaagtgattgaaggacagagaatgagagaagcttttcactttatgccttcttgttactcttgaattttaagacatataaatatatgacctattcaaaaaataaatgacgaagattcttttgctttgtttttttgtttgtttttaaaagtagtcctcttagtctggtctagaatgtctgttgctattcatatttcaacagccattcattcagagcttgggaggtgtaagaactaacttatcatcattacttacctaataggcttctcctggaaacatttctatttctgtcattgctgcagccaacatccagtcactcagggtaaaaaaataatgacatctccaattccttttcattttttttttaaccccctacagtcagtcactacaacgcgggcattctattcacttagtgtttttctttccatttccactgctacctttgtagttttaggttcatgtattaactggtattaaaatctcctaacacctgactttcaaactctaccactttctactaatcctacatcttgttgccaaattgatcatcttaaaattgtattctactgtcattccccaactcaaaaactttcagtcacaccaggtacattggcacacccctgtagtcccagctactcaagaggcagagtagggagggccagtctgggcgacatagcaagatctggtctgttaaaaaaaaaaaaagtttccagtgtgtattctgtatgttaaaaaaagcaaacaaaccgtcaatcacttagtgactgctaagtgaagtttcaccaccctaaccaggctttaagactgagatatgtccctaacctgtcttattcaccttcactccttttatattacataaaaggagtgcattaaacaattcacaatttcccaactttagccttccctttaatttccttgaaatcatttgatacctacctattggacgtctgatacaattgagcccaggagtttgaggccaccctgaataacatagtgagaccttgtctctacaaaaaaaaaataggcacggttgcatgcctgtggagctagctggctgctggggaggctaaggtgggaggatggcttgaatccaggagtttgaggctatagtgagctgtgatcacaccactgcactctagccagggtgacaaagaaaaatagaaaaaaaaatagttaaatatatatttgttttacatatgaataaacaaatgaacctgggagccagttaccccagcagtctattaatattattgagcatttacctgttctcagtgatcttttcctgagttctggtatataatttataaatattactgacttttatgcagctattgaatctataacatttaaaggttttaatattcaggatatttggaaaatgtttatatggtatgcaaccataaaatttaatataatattctaataaaacatgctcatttgaatacaatgtaaacttaatcatgtaattagttcaagcaccaattgttctaacatagatagactttataaatttaatactatgttctttcccattcctgggataagtacaataataataaacctgtgtttagcacttttacctgtcaatggcttatagaagttagtttggtctctaaacagacctgtggaatatatagggtaggtattatttctattttaaatatgatgaaactaaggtgcagagaagttgcataatttacatgaggtcacatagctaattaatgaaaaaaaatccaggcttagtcttataggcatgataattgtatatttttttattacttgaataattatgcatttttttttcttagtgaaagaaaggatgtcttaagagaagctgaaattttacacaaagctagatttagttacattcttccaattttgggaatttgcaatgagcctgaatttttgggaatagttactgaatacatgccaaatggatcattaaatgaactcctacatagggtaagtattacacagttttagtggccataattgccatttttactattcaaactatattttactttgattttatatttggtcagattatttaggggtatatagatgaatcaaagaataatgaaaaactatcacagggataaaattttaccttttgtgacatttttgtgttgattaaaacactgtggattcaggccctgtactctagattattttgcctgggttaccattcctaacatttataccaaattatagtatttacatgcatattacatgggtagaaatggaagagataaactctgcatactgtaaaatccactgttaagtgatattttattttatattaatagcaatttcaaattcaaatttaatgttattaataccagttcataaagttctgaattagcaggccaaatattaataaattatctctgaataccagatacattagcttttctaataatagacagtggtatcagccatttaccctttttcccaaggtaccagtcactctctctttgattatgaatcccttgagtaaacaaattcaggggtcctcattctcaaaatacatgtattcattattaatattatcatgagtctgtagtttcagtagatctttttaaactacttggtccattttttgagggttggcttaattaaaactgtattaatctacaaaatccaatcaatagatactcataaatgatagtgtaacacaatgccctgtaagtggccaagggaaagtgggtgccactgtcagtcagtcatagagtaacttcctctcagtttcagaatacatcacattctattcatgacttgtgaccatttgaaacaaggatggaataagtaactggtgtcagtctgtaagatttgtataactaccacagagccaagatacaaatattaataaatcacaatttctcttttatttttgttgagaaatgagtataagtagaaatctaacattttcttcccacaccccagcagatactctggcacccaaatttgcagctcgctggaaattctacagcctcctcaagggggattgctaactcctggaaaaaaaatcataaaatatacagtgagcacttctctcccttgtctccatgatcacaagcccccatattatattatgctgcagagaggcctggtaactgctttaaactgcataattttcagaaaaagttaccttttttacagattaaaagattaagtttctctaggggacaggcctctgtgtatgccagagaaagtaatgttccacgtcagctttttgtgtttcttttggtttcctgtattgcattatttagggtgggatttatcttgaagtgccctcccccaacctcacaaaattcattgagaaaactcaagatgtatcataaacagtctaaaatattttgaaccactccccctgccagattgatcactgaactataagctgacgcatttgcagaaaaacttctcaagaacagttttgtactttcagtagaagcagtctttttcatagcatttagaaaaatgtggtatggtgcctggtgattcatcgtggatcttcccaaattgcctgatcttccaaagtatgttcattctcctgggaagccacattaacttttatgttcagaaaacatttattttaagaaaactcagatggatattatttgagtactatgaaaaataaaatgttatgttttaaatgtgtctgttctatacagttttagaaacaaaaatgagtgtcccttccacaaaaacaaaacaaaaggctaattttataagctggaatgcagataaattaattatatgattaaatgtatgataaattaatgcttagtcaataaatacaatatgatcataatttgtaactgatgcagtgattataatgtatgattttatagtaatagaaaaattaaaatacaaattttgaatgaatgccttggtatttactagaaaaaaactgtctgtaattttgtgtgtatttgtgtgtactcaaattacctgattaagacatagaatgaggaggtggatgtgggtgtaagtatatgactctggctatatacagatacaaagtaattgagatttgtgtcagctgaagaaagacccaaaaccatgtagttgcatgaccaatataaactaaaaggaagtattggtgccataaagttatcataattttctctataaagtgaggaaagtaagacacaaaaatgttaaaccctatcaaattggtgctattttataaaaatgagcatatgttttaaccttagtttatactgtatttcctcatggaatatttaactttctaagtgtgaaacatagtgaaatttggactaatttcattttctttcttttcacatatatatgaagaaaactgaatatcctgatgttgcttggccattgagatttcgcatcctgcatgaaattgcccttggtgtaaattacctgcacaatatgactcctcctttacttcatcatgacttgaagactcagaatatcttattggacaatgaatttcatgttaaggtaattacttttttaaaaagtttatgtttccttgtccttatagttttaaaaatactttttagttatttcttcgacctagccaatttcatgtctctccttagagatagagactaatgaatagtaatttccatagcccctaatttctatcttctattctccttcttcctactgcagttaggaagttattcctagacagagatagaattatggtacaaaatacaaagccattatgtttcttaattgaattgtcaagatcaccttttttttttactttttattttaaaattattatatatttataggaagttgcaaaggtaataaagaggtttcatgtatccttcacctggtttcccacattgttatatcacacataattatagtataatttcaagaccaggaatttgacattagtacaatgtgtgttcatagtaaccgcaacaatcaaggtacagcactactcataacatcaccacaaagataacactcatcctacctcacccacttcctccctaccacaatctgtacccctaacaaccactaatctgctttccatctctttaattttgtcattttgaaaatgctatataagtggaatcatatagtatgtgatattttgagattggctttgttcacgtcacataatgctcttgtgatccgtctaagttgtgcttgtaacaatagttgttttttattgataagtagtattccacagtataaatgtaccaaagttaaccattcaggaacattttggttctttccattttggggtaattatttacaaagctgctgtgaacaaagctgtacaggtttatgagtgaacataagtcttcattactctgtgataaatgcccaagaatgcaaatgctgggtcatatggtaagggtgtgtttagtttttaaagaaagtatccaactattttccagagtggctgtaccattttacattccaccagcaatgtgtgagagatccagctattccgcatcattttctaaagggattctttggttttcttactgttgagttttgagaattctgtatatgttacagtagtagttcttcatcagatatgtagtttgcaaatatttcctcccagttatagtttatcttttcatccttttaacagggactttcacaaagcaaaatgataataccaaatgcccaccagcatttggtattatcactgttttctgtttagctgttctaatagatgtgtagtgatatctcatcttggtattaatttgcattttcctaactgctaatgatatcgaacacctttttatatgctaatttgccacccatacgtggttttcagtgaaatgtctctcatgtcttaagctcattttctaaagggattctttggttttcttactgttgagttttgagagttctgtatttgttacagtagtagttcttcatcagatatgtagtttgcaaatatttcctcccagttatagtttgtcttttcatccttttaacagggactttcacaaagcaaaaattttaattttgatgaagtccatattttttcttctatggatcatgcttttgctgtcatctctaagcacttttcaccaagttctacttactgaagatttccttttttgttatcttctgtaagttttatagttttatgttacatatgtaatctgtgatccaccttgaattcattttttaataagatgcaggacttaagtgctgaagacactggctattgtgatttcacagctatactatatctaactgagtgtaaataaaaagtagtttttgagtaattaatactaaatgtaactcaccatatttttatgtatcattttgctatacttcttttaataacatgtaatcagaaaattattataaatataaaaaatgttcaaagaaatcagtaatagagaagttgaaacaacagggaaattaaaacaagaaatgtgagagaaaataagtgggaaaaatttttattgaagacactcctctccttagaataaagtggtaggggaaaggagagagaagcaagctgctgcctcagtattgctaagaaaaaaagagactaatctattccatcaattatagaaccatcaagtagaaataccttaatggtcaactagttctctgatacttcactgcaacaatccctgtctcccaaagcagttatcctgtaacagggagtcttaacatccttaattgaataattgtgacattttcttaaatgatcaaccaaaattccttcctggttgcttccacacattgatcctagttcaactttttgtgataaacagaataaatccaatttagttacttcagcaagacagccctttcaatatttgaagatagctatgagctgtctcccaaaccctcacgtacaagtgcattttatccatctccctgataaataccctttagttccttcaactcgttttcttattacatggattttaatccttggtgctatgtagatgcatcattttgtttaaatctcacttaaatgttgatcgtcagaactgaacacaatactatttttggtgcggtttgatgaatgcagactttagtgaaagtgtcatttccttggccctaaatacttaatagttccttaataattcatcagctttccaggggtagtcatatcacatagttcaaattgggcttagtgtcaacaaaaaacccttggaggttctttttgccacgtatcgttgcttaagccacctcttcttaagcaacaaagtacacaaaataatgtactttgcagaatactttctagatatgatcaaattttatcttgttagattggagcaattgcttcagtctcttaagacctttttgaatgttatttctataatccaaaggttttaagtttctctccaagttttgtgtgatgctgaaatttaattagctaattttttgtatctttaagtcatgattaaatatgaaccagtacagagcttgaatcagagctgtatcacatggccataagaaccttcatctgggtcaatatcagtccttttgttaatccgcgcttttggagaacactcattcagtttgtctggaatactcctaaaagtgctattatacagcccatatttcttcattctgtccttaaaaatttttctgaaagtctttgcttaactgcttttctcagctgttctcatgacttagtcatcttggtccttttctgtgaattcaattttaaaattcttgattatttttattttttttcttaaattgactcttttattgtagcaaatgaatgaaaaattcatttattctacccctcctttttgggaatggaggccataattttttttatctcaaattcatctaaatgctaataaaaattatgtattttgttaaaattggtaaaaaatataggaggtaaacaatggaaacaaatgatgtgctgcatggagctcatttcactctgctgaattctaaagtatgcagtaaaatattttaagtaatttcagtgtcttttaggatttcccatactcccttgtcaattaaatattatttctgttcttacattttgtcttacatttttaaaaaataaagtaaaaaataaggaagcttttaaatatttagttataagatactgtataatatgtgcataagatttacaactgaagcaaaactgtacaggacatatcaaaggcacagaatattgtcactgataattctttaggcacccattgtattggacataaatatgttttctttgcaattatactgtttccatgaaatacttcttttagtgatcagcataaaattgtataataattacctttacaattttgagatttagtgtatttcttaatttaaggatgctacctttagggcattattaatacaactgtataaaccagaattgtaaacaatgaccagtgacaattgcatgagatgtgagtagacttggcagctctgtgagatgtaggaagcacatggtatcaagctatatgtcatgaaaagtaaggtgtgcaaggtacacactcattgagaatatcagacaaaaaatgcctctgctcaattttcaaaaattagtctctcttttgaaatttgtaatgttatattaaactttaactcagtatgtattgctcctagagttatttggctcagcagtgtggaatttaattttgtaagaagttgggggaatatacagaaataaaatattaaaatatattacattttctctggtttgatatctaaatacagtgaatatacaaaaagatagttgacttttggactttttaaagaggaaatttcttaattatttgctcttgtcccttacagattgcagattttggtttatcaaagtggcgcatgatgtccctctcacagtcacgaagtagcaaatctgcaccagaaggagggacaattatctatatgccacctgaaaactatgaacctggacaaaaatcaagggccagtatcaagcacgatatatataggtagagtaaagttgcttctgctcagatttaaccttgtctcagacacaaaattagtcaaccagaattttgaagctacattttaaactgtgatttttattcttctctcataattgtggtgaaaataaacttgaggccccacggtgattaatatttttcaaattaaggaaatttaatgatttgctttaagaaacttttacatcctttaagaaattttaaagcatctcttcttatcctatcaatttataatataatagttaaggatttttatcatatgtgacttggaaatgcagagggaaacagtggttcctaacattttagctttaggtttctcaacctgttcaaccttttagcttttgatatctatatatctttttagataaatagacaaactcttaatcacactggggatatttctatttaaagaatccctaatatttgtatatgtgtgaattttttatacaacaaatcaatgggtttgataagatcatattttcatatttcagatgcatattacttataatctcataatgcagtaataagcataacacattgttattgacactggttatttaaccagaataaaaggaagatgattatttacacaggtttaggagatggggacattcacctcatgtataagttactcttatctcttttaatatactaatgaatgcaaaagcagactctctaagtttgctctgaacacattttatagtcctttaaatggctttttgccatctttaataaataatttgttaatgaatcattttaggaatgaatgctatatctctaccagaaaactatatatttaattaaattgcatattccttttcttcaaaagcattttaatttttgttatttctcattaaaaccaaagccagccaatccattttagtggctgcactaaaacaattcatacagtgtcttttacattcacattgtatgaatataagaaactgtccttttatattttgttttctgatatttttaattcattctgaatgatgtactgaggggaggagaaatgtatttatagcttcctaaggtagagatcatgttctacccaacaattcttaaagctggtttgattctataaaaatgggccaataaatctgccagtcattcattttgtgaattttccctttatgttcaatttcaatattctctgtcagggaaaaatgaggaaatattattccttcatttgggtaggaattccctctgtactcctcgctctccctgtaacacaaggtgttagtagtaataaattctatgtgtccattttgaatgcatggttaatgttggggtgtggcaaaattcttatatcctatttaaccatttattctaattataaactctatgcagcttaaccctgtaattgacatctgaagttaaactgtaggcaagatatttctactaccaaagaagatagtgctgagagcagaaaaaaggcagtagaatagagctccatgagacaatttttttcttgttctttgttctttgtgaaaaataatatcatttaattaaagggcatagcttatctgggtgtccaagaattaaatcatccacaaaaagttaatcttgcatgtaacgttaagcttgtattacagtaatttcctaattttttaacttaaagttgattttgtttccaaactacatgagcatttatcatcttcattgtatacagtaattctttgctgccttatcactttgaaaaatggtatcttcagtcagcttttaaaaatagtgctattttagtttattatgcagagttcatttaaaatatgtaacatgtatgttcttatgttaaacagctatgcagttatcacatgggaagtgttatccagaaaacagccttttgaaggtaagtatggtttgacttttttatgctcaataacatcatgttagtaggtcactctcagaactatctaaaaatcatgttattttaaatctgcttattcattttgtggaaaacacactaaaacaaccatttatcagttgtgaatgcatcacatactgcaaaatataccgggttaaggatccagttgtgagtctactatatactggaaaatgtactggattaaggatcagaaaaacccagattttaattcttgttctgacagtaattagctctgtgatcaagtcacaaatctcttgcgtcctcatttttgtcgcctgcataataagaattttaaattactatttccaagttctagtctagctgtaaaattatttatatgataatttaattactaccccctctataaagactagcaaatatcgaagactaatctgtcctttttattccctgaaaatattgtttatttctttattttgaggtttgtgtaggtcagcttgttgtgtaacaaaaaacaacctcggaatctccgtagcttatgaaataaacatttatttctcattcacattaaatattggttgctgtagcccttcttagttctgcaaggtttcgctcagctctgctttacaaatactctgttgaccaaatccaatcacatggtcaagcccaaaattaatgaggtgaggatataaactcattccataggaatcagacaagtctggcaatggtttggggtatatatattccttttacagaaaggggggtaaggcatcattcctaaaatttcaatattcacttattttcttttagttagttttagatgtaagtaatatgcttaatcataatatattactaatgaatgcaatctatttgttttgacagatgtcaccaatcctttgcagataatgtatagtgtgtcacaaggacatcgacctgttattaatgaagaaagtttgccatatgatatacctcaccgagcacgtatgatctctctaatagaaagtggatgggcacaaaatccagatgaaagaccatctttcttaagtgagtatatagttttaacctagactctttgaattacagaattagttaatatactgtgaataaaatattccttgaaaaattgtgcaaattagatgactagctagaagttgtttaaattattttctgtcttatcatagcatttatatatgagtaactccttctagagcagaattgagaattcctaacaaaaaagagaaatcgtgtgataggagtaacaatttctttcatatatttaacaaatatgtcttaaacccctaccatgtgctatgtatatactggagtgagccctgggaacagagtagtaaacaagacaaactttctgtagctagttcacattctagttgagaaggcagagtgaaaacaaataaataagcaagatacacaaattgtgacagtcttataaggaaataagcaaggtaatagactaattaagggagggaaacaaaggcctttttttaggggcaaacatttgagctgacatttgaagcttgaaaaagagccagtcattcaaatgctgaagaaagagtattcagccaaacaaaacagcaagcataaaggctctgagcctagaagaggaaaaagttttatattctcaagaaacagtgagaaggcctgtgtggctggaatacagtgagcaaggaaaggaattagatgatattggagagttaagagagaggctattggccatcataaaaaggttagatttttattccaagtgcaatggaaagccattaaagtatcttttgcagggaagtgacatgatctgatagaagtttaggtgaaattcttactgctgtgtggaaagttgattggagaaagacaaaagtggaagcaaagaggctagaaaagacactttcaggaatattctaattaaggtggaaattctgaagacagaagagttacagaattaagatagtatttcagaggtagaatggatcagacatccaaatgtaaatgtaggagaaaatcttcatgacctagggttaggcagaatctttaaatatgacatcaaaaataaataggattcattaaaaaatttataatcagactttgcaaacattggaaacttttccacttcgaaaggtactattgagaaaagagaaagccaggcatttagtgtccacgactttagtcccaggtacttaggaggctgaggcaggaggatcacttgagcccaggagtttgaggatgtgtaatagtgcactgtgatcgtgcctatgaatagctactgcactccaacctgggcaacatagcaagacctcatttccaagaaggaaaaaaaaaagcagagccacagactgggagaaaatatttgcataacatgtatctgctaaagggcttgattctagaatatataaaaaaccctgacaagtcaataataggacatatagccctatttttaaatgagtaaaagatttgaatttcaccaagggagatatacaaatagctaaaaagcacataaaatgatgcttaatattattagtcatttggaaatgcaaattaaaactgcaatgagttaccacttcatacccacaaaatagctataattaaagacagaaaataacaagtgttgacagtgatgtggcagaaccaaaatccgtatacattgttggtgggaatataaaatgatgctgccactttggaaaacggtttggcagtttcttaaaaatgaaagataaatttaccatacaaccaagcaatccactaacaggtaaaccaagagaaatgaaaacatatgttcacacagttgtatgtgattagtgatagcagcattgtttataatagccagcaagtagaaacggtcataattactgctgctactactacaacaatacatgaatctgttgttccaggaagagtccaggatcctaatataaaattgaacatcactaacatattgatagtctggactggttcatctaagaagggaatatacatagcaaagagaggacccatagtaaagctctgaggcattccagcacttagaaattgagaagaggaagaagaaaaaggattaaggaagagaagacagtagagagtgtagtccttgtgtcttggaagtcaaggaggggtatagtcggacatgtttaatctgccaggaggccaaatgagataagcaggattttccaacattgtcatcaccggtaatccaaacaaatggagttttaatagagagatgtaaacagaagactgatgtacatttaaaaaaaatagaaagaagtgaaggcaaatatggaaaattccagcaagatgcttggctctgaacagaagcagaaaaaaatgaggtgatagctaaaggatgatatggggtcaaaattttttcctatggccaggcacagtggcccatgcctgtaatcccagcactttgggagaccaaggcagagggattacttgagttctggagttccagaccagcctaggcaacacagcaacaccttgtctcaacaaaaataaaaataaaaaaaaaataaaaaattagccagacatggttcgttgcctgtaatcccagctacttgggaggctgaggcaggaggattgcttgagcccaaaatgttgaggctgcagtgagccttgattgtgccactgcacttgcactccagcctagctgacaaagcaaaatgctgtttcttaaataaaaaaaaaaaatcctggagaaagatagattactttatctggaaaaaatactctactggaaaaaatgatccagtagagagtcagagattgtcagtgcaagaactgagagagagtatcagaaacagaatgctggagaggtggaggaaatggtattcagaatgcaagtgatactgtttacatttgtatgagtatatggacacttttttctactgtaagagaaatgaggttggagagatggatacaagtacaagaagtttgtagatctggttatagaaccctgaaggaattccctctcatggcttctattttctcagtgtagtatgagagcagatgatcagctagctcaaaggaaacatggaggatgggatgtaagaggctgaaaaagggaagataaagtacaatgcctattacccctgccttccctttctaagttcagaatatattaagaaaaagccgaggaagaaagatagatgttgatcagaatatcagtttcattactgataaagctaattggagaatgtacctttagatctgcagccaaatgggcttagtagcattttacccctacagttgatagctttaccagcccaccacaggcctcaccctgcttctacatagggaagcagaaaatgtatgcattctttaggcaagctgacttttaaaagaaggagaaaactgcaaaggtaccaaataagcatgcttagtttttctccaagtttaataaatgaggtaagtctgaggggcagaaaggagctggaagaattcctcctatacttctctttcctgaggattgaactggaaatgtcatcttcctgttggaaacatgaagaaaaggacttaagtgtctcctccaacagtacgagataattatgtaagacagcaattctcaaacttagatctcaagactcttcaaaattattgaggacttcaaagagcttttgtatgtgtgggtaatatctattagcatttactgtattagaaattaaaaccaaggaattttaaaatgtaggaatatacaagaacacattccattatctgttgaagcagtgatcttatcacaccttatttatgggcctctggataaatccactatatacttgtttggggatgacagtgaacagggaaaataatgtcttagtacttgttattttgaatatagttttgacttcatgaaccctcaggaaccacccccgccaggggtccctggaccacactttaagaaccacttatctatgagaacagaatagtagatgtatttaggaagcaaaataggattgctgagaagtggtatttagtgtctagtttgggccgttaatttagagaaaccagcgaccccacttctggccaagatggagtaactggggccaatttaccctcctgcctgaaacaaccaaaaaacctagacaaaatatgtgaaactggtttttaagacactaaatatcaggaaacaaagagcagcaatctctgatggatgggaaacaaatgaagtgagccttccgattgcccagcttcctgccttgagagtttctagatgcagcatggggagaggaaacaggtggaacccagtggacactcagggtcaaggaaacagggatgacagtgtgggtagaccaaggcagacagacttcataggacattgcaccagaagggaaaaggtacacagagtgagaaccccagagatttcagagggttcctctcaagtattcagtggagcactgatcagtacagggtgaagtcagtaagccaaaagccaaaatcttgagcataggagaaaggagaagtttgcagagaagtaagtattgcctaatggcatgaactttagaggatctagaattttcacagaaagaagaaattacgatttggaaatggcaaagagaggacaacagagatatatacccttcctcatggctctggaaagaaagaaacaaaatgtgaacccattaccttagcaacttttgatttgtaaatataatgctgatgaacaatggatataagtattgaatgaaaaatacaatgcattatttttctagtaataagaacttagagtttatttttaaactgtcttaactgaaatggcctataaacatatccagctttgtatctaatagtacagtgtgagtgtgtgtgtgtgtgtgtttaatttatcacatttcttacaaagtactgttgtctgccttagacatgtttcatttatagccattgggatgctactggttttgttgttattgttaggttttgaactttgtttttaaatggaagtacaacttttttttcctaggatgactgtttcctattttcagtgggaaggtaccatcattgatttataaacacactactgcctatacagcctgtcagttttattttaaggctctggtgtatattggaatgttgaaaagcagattctgggaacctgaaagggaaaggaagaaaaaaaaatcaataataaggaaagtttaagtgtattcagtaaagaaattctgtcaataggaccaaatggaagaacatgaaattacaaagggatctctagataccagagtaagcacaagatgcctacttttggacaaacctactgaaaagaaatgaaaagttcacaatgaaagaaattttaataaaaaaataaaggaagcttgaaaaactaaaagcaagcaatatttttcctttttttaaaaaaaatataggttaactgaattaaggaaaagaggaagatcagtaaacctttgttgaaaaagtaactagagagtatatattctgaaaatggatttaactgttcaattaatatacatattaaatggcaaagtaacacagtagcagagaggaatcatataataaagattatttttttcaaaagcctatcaaagtataatttacttaccataaaatttatctatacattcattgactttttagtattaataattttacagtttgcaaccattactataatccaattttcaagtatttccatcaccccctacaaaatccctcctaactatttgcagtcactgcctgttctcaccactaaccctaggtaaccagtaatctattctctgtctttctagatttgccttttctggatatttcatataaatggaatgataacaatgtgtggtccttttgcatctggctcttttcacacttagcgtaatgtttctcaggttcatccaggtttcggcatgaatcatagttcagtaatttattgttgaataatacatcatcatatggatgtatcccattttgttgatccattggccagttgatgaacattttgattgtttctacttgttgcctctgtgaataatgctgctatgactgttcacatacaagtctgtgaacatatgttttcatttctcttggttaattatctgtgaatagaattgctgggttatatgataaatttatctttaatttttaagaaactgcaagctgttttccaaagtagctgcattatcttattcccaccagcaatgtatgaggttttcattttctccacgtcactgtcaacacttcttattttccttttaattatattttagtgagtatggagtgatatctcattgcagttttaaagtgccttttcttatgatgttaagcatcttttcatgtgcttcttgaagacatttgtatatctcctttagtgaaattcaaatcttttacttgttttttaattttgctatttttcctgttattgtcatgggtctgtatatattgtagatacaaaccctttagcagatacatgatgtggaaatatagtgtgcaaggctgcagcttatcttattttttcttaatactgtcttgaagtgcaaaagtgttcaaattttttgaagtccaatttttaggcggtttttgggttttttttttttttttttttttgagatggagtcttgctctgttgcccaggctggagtgcagtggcacaatcttggctcactgcaagcttcacctcctgggttcacaccattcttctgcctcagcctcccgagtagctgggactgcaggtgcccgccaccacgcccagctaattttctttttttgtatttttagtagagacggggtttcactgtgttagccaggatggtctcaatctcctgacctggtgatctgtccgcctcggcctcccaaagtgctgggattacaggtgtgagccaccatgcctggcccaattttcaagttttttaatggatttcatttttgatgtcatatctaagaactctgcctaacccaagatcatgaggattttctcctatgtttacatttaggtgtgtggttcatttcaagttagtttttatgtgtagtgtgatataagtatctaaatttatctgtttccaggtgtatatccaactgttttagcatcatttattgaaaaggctatgctatcatttccccattgaattggcttagcacatttgtccaaaaacaggtgtttttagattctcaacactattccattgttgcttatgtctatctttatgtcagtaataaaagctcgtaaaacagctgaatgtcatcactttggggaaaaactgacttgaggccttgtacattaaatgttagcatttcactttaatacttagaagcaatctgaactcaacctgtatttttttctcttatgtagaatgtttaatagaacttgaaccagttttgagaacatttgaagagataacttttcttgaagctgttattcagctaaagaaaacaaaggtaagttgctaaatgaaatgctggaaattagaaatttaaacaactatataatattcatggagatttttagttaagtgtagtttttaatatatatactttacacagatataagctacagttttggagtgagaaaatttaccagagactatgaatactacttttcctttgtcaccaaaagcttttctatttcattcaaatggccaccttcagattttaaagacatttccaggaccaggcgtggtgactcacacctgtaatcccagcactttgaaggccaaggcgagtgaatcacttgagcccaggagttcgagaccagctgggccacatagcaagaccccacctttatttaaaacgtaaaaaaaaaaaaaaagacatttccagaacccttatatatcagacataaatttaaaaatgtataatcacagccagttgtgtacaatgaatgcactgagccattagaggtgtttgttttttaatgtacatttattttcccaaagttgtaatgcctagagaataatagatgtctgggttctcgcacttctctttttatttaatgtacatttttttctgagattcctcgccaagtttagctgtagaatttttattaaatttgagaccaaagtgtgtttgtggtttgttttttcatttttcctctcaaacacttcatgttttatagaccaaggtagcagtaacagtttatatgaattacctaggagagttgtattaaatactcagtctgattcttgtgggtcggaacaatttaagggacctattactgcaggggtttttttttttttaatattactcaaaattgtttaaaaagcaaccacagttcattagggcaagtgctaaactatgcttactttgccctaatgaactgtggtttgttaggggatataggtttcattaaattgtacttaatatatgatataaaaaccagcagttagccaaactcttggggtgtgaacaagcaacatctacaatttttatcacaaaatgacattgcttgcctgccccttgtgggttgctggatctagtgacataacccttggtttcaaagggaaatgcataaaggaaggaactaaagaggaactgtgttttcattcttttaataacttttcactggctccaccacttctgagtaggtagtgttttccagaaaataccaatttctctcttccttaatagattgaattttttttttttttttttttttagtttttaaagacagggtctccctctgtcgcccaggctggagtgccatgacaggatcatagctcactgcaacctcgaagtgctgggctcaagcagtcctcccacctcagcatctccaattgcttgaaactacaggcgtgggctaccacactcagctactttttaagttgccatattttttccactcaggattgttcttttttttaaaaaaaatcttgtatcaattctgtgatacttatagggcaagaatatcatctgatttttgtagataagataactaaggtacagtagtcttcccttatgcatgggagatacattccaagaccctggtcaatgcctgaaaccatgggtagcactgaaccctatgtatactgtacatacatacctatcatacatacatacttacttttcccatgcatatatacctatgataaggtttaatttataagataggcacagtaatatattaacaataaccgataataaagtagaacaattctaacaatattctggcatcactattcttgcactttgggccattagtagtaagagttgacttaattagtaataagagttatttgaacagcctaggcaatgtggcaaaaaaacataacaaaacaaaacaaaaaatatagctgggtgtggtggcacatgcctgtagtcgtagctactgagggctgagataggaggatcacttgaacccaggaggtagaggctatagtgagctggcactccagccagggtgacagagtgagaccctgtctcaaaaaaaaaagttacttgagtacaagcactgtgatcctgacagttgttctggtactaacagggtggtagcttatacagcatggatatgctggacaaagggatgattcacatcctgggtggaatggagctgtaggttcatcatactacttagaactgcatgtgacttaaaacttatgaattgtttatttctagaattttacatttaatattttcaaaccacagttgagcaagggtaatggaaactgcggaaagtgaaaccaagataagagggggactaccgtatagggaagttagtcacttatgtacatctcacacagtaagctaatgtcagggacaacagtagaacacgaattaaataagattcttcataaagaaatttctgagctaggtgtgatggtacatgcctatagtcccagttactctgaaagctgaagcaggaggatctcttgagcccaggagttccagtccaacctgggcaacataccaagaccctgtctcttaagaaaaaaaaaaaaaaaattctgaaagccaaaattagtagggaaatttgttttgagtttcctacattttttcaactcttggaatcagctcccgtaatttatgttttcctaggtaattggcttctaaatcttgaataataaacactgaataaacatagtttttcttcagttgttcatttcttcttagggacagattcactaattcacaagtaatttgaattatcataactgatcagttatgaaaaactgttactaattcaaggatattgcattatcagaaatgttttggcaaattttataagcagaggaaaacctcacataacagagataaaaccaaaaactcattttaaagggtcatataacaatatgtttatagatgtttattgaactgctgtgtataacgccctgtgctaggtacattatatacacagatgaataagagtaatttccttctgaagttccttagccatgtaaatggagtatgcagtcataaatgtgcataatggatggctgggtgtgaattcaccattttccaaattctgaagagtagttgacattatgatggtctggggaagaaaatgattgataggtttgtatttaaatcactgagtagtgatggaaactaatccaagcctagcttatatagacaggaataaaccacttaattttaacacaaaagaatagtatttaagtaaatcatctactcagcagctaccatttattgaatgcttacaagtaatgtttgggcctttttgcatatattacttttcattttcctcacagtaatccttcaaaataggaatttttatctccagtgtacagataagtaaactgagattaaatctaatgtctcacgtcaaacagatgtgggtctctaaatcacatctgattggctccatggccctgccattccattattgacactctacctcctttacttagtccaagcctcaatctcttaactataaaatgaaaataataatagtacttacaggcacagtgcctaaaatgtggtaaatacttaactatagatagacatacaatcacactcccaaaaattcccaaaaatttattaagtacctagtttataccagatatttcatatttataagctcaatctctagaaccatcctgcatgtaggtaattgttagatttcgaggatgaagctctgagacactgagagaaggtaaccaattaatatgagccaggattcaaagtctgtgtttctaaagttatttcccgttctacactgtcttttccttcagttatatgttatattctcaactctttatattttctttccatgtattttgtacaaacatataaaatgtgttagattgtattttacttctataatttcctaatcatctccagttaaagtgtatatatatttatgtattcattacagttacagagtgtttcaagtgccattcacctatgtgacaagaagaaaatggaattatctctgaacatacctgtaaatcatggtccacaagaggtaaaaaaaaaaaaaaaaaaaaaaaggttatattaaactcaaaatgtgagaagaatttgaaaaaatcatttggtctaagcccttcttttatagaaggaaaactaaagcccagggagcttttaggatttgtttggtagctcatgtcaatctccaacttgaaacccagctgtactgattctcagttcattgttcatcccatcaaatcacaattattgcttctttgtttgacattgagttctgtccctgtcattgttttatacaataaatgatatcccagggtattatgtaggcaaatcattgattacagttttaacactgtatttatgctaccttgttcttacctcttataataattaatgagaggaaaacattgctgcctaggaagaaagatctctttagtagcattcaatcagacttatattagtctgaattagtaatttcttttaagaatgtatatgtatgttcattttacagaattagaaaagtaacatagattgagcatccctaatccaaaaatccaaagccctccacagtccaaaactttgaacaccaacatgatgccacaagtggaaaattccacacctgtgttagtctgtttatcgttgctataatgaaatacctaagagtaggtaatttataaagaaaagaggtttatttggctcacaattctggtagccagaaagtccaggattgggcagctgcatctgatgaggaccttaggccgcttgcactcatgttggaaagtagaaggggagcgagctatgcagagaaatcacatggtgagacaggatgcaggagagtgaaaatgaggaagtcaggttctttaacagcttgctctctcaggaatccactcaccacttctagaatggcaccaagctattcatgagggatcttcccccatgacccaaacacctcccattaagccccacctcccaacaccaccacattggggatcaaatttcaatgtgagatttagtggggacaaacaaaccatatcaaaccatagcaacatctgacctcatatgataggtcgcagtcaaaacattgtttcatgggtggacacgatggctcaagtctgtgatcccagaactttgggaggccaaggtgggtggatcacttgaggtcaggagttcgagaccagcctggccaacatgacaaaaccccatctctactaaacatataaaaattagctgggcatggtggcgcatgcctgtaatcccagctactcggggggttgaggcaggagaattgcttgaacaagccaagatcgcaccactgcagtccaccctgggcgactccacctcaaaaaaaaaaactttgtttcaggtataaaattattttaaaatattgaattaagttaccttcaggctgtgtgtataaggtgtatatgaaacataaatgaattttatatttagacttgggtcccaaccccaagatatctcgttatatatatacaaatattccaaaatctgaaaaaaatccaaaattccaaacacttctggttccaagcatttcagataagggatattaaacctgtagtatctttaaaacgaaccttaaagcatagtatatcacatttttaatcacttgatgtacagtatttcatttgatctttgaggccattcatgcatatttttagatagacagtgcggataatagagccaaaaacctgagagccagagaggttaaataccttattgaaagttagctagtgattccatgacagagctaggagtaaaattctccattactttttccatgttttcctgtgcctccatgtggaaggaacctgaggtgctgagaacaggcatttctaaatctgtaggagaccagacttgcagataccaaatttctcattcactattctagctactggctgcagcatctgagatcgtgtagaaaatactgaaaaaataattatttctaatgtttcattattcccctatttcgcccatttgtgttaattaagaaaataagtttatctttgttggttattttatagatgtatgtgtttctttaattttgtaaagtataatttttagtagttttgtaggttgggcacaatggctcacacctgtaattccagcactttgtgtggccaaggctggtggatcacttgatcgcaggagtttgagaccagcctgggcaacgtagcgaaaccccatttctacgaaagatacaaaatttagcatggtatggtggtgtgcacctataatcccagctattaaggaggctgagatgggaggttcacctgagttcaggagggtggggctgcagtgagcctaggttgtgccactgcactccagactgggcaacagagtgagaccctgtctgaaaaaaaaaaattagtagtttttatcttcatttgtgataagccacaaacaagaactatttagaaattaaagctcgataatttttattaacctaaaccctttattttttatttactttaggaatcatgtggatcctctcagctccatgaaaatagtggttctcctgaaacttcaaggtccctgccagctcctcaagacaatgattttttatctagtatgtagattttccaatcattatttacttgcaagttttccattttctttcaagatcaaatttttgcaagcagtcatgatttctatggaactttaatttgcatatataactcattttgtaaagcgacagagtctaaagataggaaaatagtagtgtgatattcaacaaatacatttaagttttaaggcattatgtttggccaggcgcagtggttcacacctataatcccagcatgttgggtggccaaggtgggcagatcacctgaggtcaggagttcgagaccagcctggccaacatggtgaaaccccatctctactaaaaatacaaaaattagccaggcatggtggtgggcacctgtagtctcagctacttcggaggctgaggcggaaagatcgcttgaacctgggagggaggttgcagtgagccgagattgcaccaccacactccatcctgggcgacagagtgagactctgtgtcaaaaaataaattttaaaaaacaggcattatgttagacactgccagaaaatgtccgcaaaaaaatctcttacaagaaaaaggagaaatgtttctaaataactattatatgagatagtgatataagagagacgtggatctagagctatggtagtacagtggaagagtaacactgtacaaaggactttcacaacaaccttgtgagagaaatgtcctcattttacacatttaaggactctggatcacatagctagtagctggcacatctaagacttttgataaatattatcatgtcactctactctaccatgttgtcatcatgaaattatttctggctgaaggctggatctgtaattacaaaggataggcattccaggcaaaaggaacaacatacaggtacagaagcaagaaaatacagagaacagtgagtaatttggtttagctagtaaagaaggtgaatgaaagaagtaagagctaagtagattggagtcatatcatcaagaattctaactttcagctgaactatttggacttttttacttgagtaggaagcaactattgcaattttttgagcaagggagtgacataaaattttttactttggggagattcattctggctggaatgtgtaggatattttgaaaggaaaaggaaacttgagatggggagatcagttaggagactattactgtagtacccgtgagagattattaagaaccgatacagaatgaaagaaaggaggggtggtatgtgagatgttatagacaactagatgataggactttgtaacttttcacttagaggagcgatgagagaaaaaagaggtaaagccaaataaattgttaagcctggggactgggagaacattggtgccattaaaagaaatagaagttaaaacaggctgcatgcggtggctcacacctgtaatcccagcattttgcaaggccaaggtgggcaaatcacttgaggccaggagttcaagaccagcctggccaacatgccaaaaccccatctctactaaaaatacaaaaaaattagcgggtatggtggtgcacacctgtaatcccagctcctcaggaggctgaggcacaagaatcacttgaacctgggaggcaggggttgcagtgagctgagattgcgccactgcactccatcctgagtgacagagcaagattctatctcaattaaaaaaaaaaaaagttaaaacaagttttagagttaagacggataattatacttttaatgtttttgtttttgtttttaatttgaggtactaggagcacacaaagggttgatggccagagggcttttgaaaatataacactaaggttcatggctgagtgtagtggctcacacctgtaatcctagaactttgggaggctgagacaggtggatcacctgaggtcacgagttcaagaccagcctggccaacatggtgaaattccatctctactaaaaatacagaaattagccagttgtggtagcatgcaactgtaatcccagctacttaagaggctgaggcaggagaatcgcttgaacctgagaggtggaggttgcagtgagctgagatcgcaaccattgcactccagcctgggtggcaaaagcaaaactccatctaagaaagagagagagacagagagagagagagagggagggagggaggcagggagggaggaaggaaggaaggaaagaaggaaggaaggaaatataagacgaaagttcaatgaagacagaaaatgtaattgcgtggatttgggaatagaggggatgattaagtccctgaggctcagtgggattgccagaagagaaactagaaagacagacatcatatatagatttagagaacatacttaaacttcagaaggagtaagaagacacacaggaaaaatatgggactatgtaaagaagtaaaattctatgatttataatttacacagaacagacaatttctgacagaaattgtagtgaaagcattccatataaacccttttttgttttaagaaatatctacttgcagaattaggtttctgaaccagccttaatattagtggaaactaaagacattggagcctaccttctgtctgctcagatgttgacatgttagccaataggaatttctaaggagtattctacttctaatgaagatgttgtattttgtaggaaaagctcaagactgttattttatgaagctgcatcactgtcctggaaatcacagttgggatagcaccatttctggatctcaaagggctgcattctgtgatcacaagaccactccatgctcttcagcaataataaatccactctcaactgcaggaaactcaggtaaatatttactgtgaaacaccttgtaagtgatgccattgaccttacatatctgtgttcagtggatttaccatacaatgaggtttgtctttatttcctcaatatgataaatacataccttcttaagtaggaaaacaaatcccaggagatgggaatgatgacatggcccaaatggtattctatgaacatctaaatagggaggcagtgctaagaggaggtattaacatattactaatggtaaagttatttttgtttatttaaaaaatttgcaggtatcttttatatttgaaataaaatggacatcaaacaaaactgaacaaatcccagaagatggaaatgatgacataaagtggtttttgccccgtgatttataccataggaaaaggcaatgccttttctggggagtgagggggagataacccaaatctctgaatgtttcctgaaaaatgacaccattccccaaagtgttggtgttccatattggcacaatcataggaaaattatgttttatgctttatttatttttcatggaattttacttattgctatgtatctgtcctcaccttttaaattattcattccttgttctttttcagaacgtctgcagcctggtatagcccagcagtggatccagagcaaaagggaagacattgtgaaccaaatgacagaagcctgccttaaccagtcgctagatgcccttctgtccagggacttgatcatgaaagaggactatgaacttgttagtaccaagcctacaaggacctcaaaagtcagacaattactagacactactgacatccaaggagaagaatttgccaaagttatagtacaaaaattgaaagataacaaacaaatgggtcttcagccttacccggaaatacttgtggtttctagatcaccatctttaaatttacttcaaaataaaagcatgtaagtgactgtttttcaagaagaaatgtgtttcataaaaggatatttatatctctgttgctttgactttttttatataaaatccgtgagtattaaagctttattgaaggttctttgggtaaatattagtctccctccatgacactgcagtattttttttaattaatacaagtaaaaagtttgaattttgctacatagttcaatttttatgtctcttttgttaacagaaaccacttttaaaggatagtaattattcttgtttataacagtgccttaaggtatgatgtatttctgatggaagccattttcacattcatgttcttcatggattatttgttacttgtctaagatgcaatttgattttatgaagtatataccctttacccaccagagacagtacagaatccctgccctaaaatcccaggcttaattgccctacaaagggttattaatttaaaactccattattaggattacattttaaagttttatttatgaattccctttaaaaatgatatttcaaaggtaaaacaatacaatataaagaaaaaaataaatatattaataccggcttcctgtccccatttttaacctcagccttccctactgtcaccaacaaccaagctaaataaagtcaacagcctgatgtgta

SEQ ID NO: 102 - DNA, 9565 bp, Homo sapiens
atgcaccacctcctggagcagtcggcggacatggcgaccgcgctgctggcgggagagaagctgcgggagctgatcctgccgggcgcgcaggacgacaaggcgggcgcgctggccgcgctgcttctgcagctgaagctggagctgccgttcgaccgggtggtcaccatcggcaccgtgctggtgcccatcctgctggtcaccctggtcttcaccaagaacttcgcaggtgaggccggcggccggggcgcggggcgcgggcagagggggcgtccgcaggtgtccgggagctggcgcttcccgcgtccccggcggctccgtccagccgcgcccaccgtggcctggctgcgtccgcggcgtcccaggcaccttccacagccgcccccatcctagcaggtgtcgctggtcgcacagacccctcgtctctattttattgttgttcttccttccattcgtccgcccatggccgcgggtgggactaggcctgtctggacccaggggtcccaaatgtcatgagacacggggtctggtttggagaatgtcacaagcagcgcctgaggggatgcagggtggccaggtggggaccaggaaaggccgggatgggtgttgacagcagagagctgattacaggggctggtggagctgccgggcagggttcccaggctggacttgggtggaaggagggcagagagagtctctgagaggcccaggccctccacccctcaggcagggcgaggcctctccgggtgcactgggggcctccgaaggtttgaagcaggggggctagcatggggcagggccacgtgtcagagcagggagcctggagctcctgcagggagatgggggctggaccagggcagggacccgcgctggttagatcaggacctgtgggggcacttgaagccacccaggcgaggcaggaagatggacagagcagccagcctgcctgtgagcctctgcggggtggggtcctggtgcctctgccctccccaaggagtggggcgagacaggtggagccgagaacttcctcccctggggtctgggccaaggcaagggggatcagggtctcctggcctgtgtggcccagaggtactagtctgcagcggggaggggtgttgggaccctggggccctctcttctgcagcctccaaacctcagcagaccctgcctcagcactggcgcttcccaaatctcccagatgccttgccttaaggagtccccgtggcctggagacaccaggcctgagggtggacattggccaggctgtctgatcccacccaggggtggaggaggcctctgctggtctcctcttcgacactggaggccagaccccggggattagaggacccctggggtgggcacacagcacactctgcagagcagggagcccaggcgtgcggtggggccttggggcaggcccagcatgtccagacaccacgtgtgttctctgtgtttgtagcaaccaagtaccgcaaactaggcagtttcaaacagcagacatttatctctcatggttccggaggccaaaagtccaaaatcgaggtgtcggcagggccctgctccctcccacagctctaggaaagggacattccagcctcttcagcctctggtgctgccggcaatccttgggcgccttggctcgtggccgtgccaccagtctctgcctctgtcttctcatgggcttcttccctccctgtctgtgtccaaatttcctttttttttgagacagagtcttggtatgtcgcccaggctggagtgcggtggtgcgatctgcaacctccacctctcgggctcaggtgttcttcctgcctcagccccgagcccccagtagcagggaccacaggcatcccacaccacacccagctaatttttgtgccatgttccccaggctggtctcaaactcctgggctcaagtgatcctcccatctcagcttcccaaagtgctgggactacaggcgtgagccactgtgcccttttctcttcttcaccacccccccgctttttttatttttattttttgagacaaagtctcgctctgtcacccaggctggagtgcagtggtgcgatgtcggctcactgcgacctttgcctcccgggttcaagcgattctcctgcttcagcttcccaagtagctgggactacaggcacccgccaccacgcctggctcatttttttttttttttttttgagacagagtctcgctctgtcacccaggctggagtatagtggcgcgatctctgctcactgcaagcttcgcctcctgggttcacaccattctcctgcctcagcctcccaagtagctgggactacaggcgcccgccaccatgcccggctaattttttgtatttttagtagagacggggttttgccatgttggccaggatggtctcgatctcctgacctcgtgatccgcccaccttggcctcccaaagtgctgggattacaggcgttgagccaccgtgcctgacccattttttgtatttttagtagagacggggttttgccatgttggccaggctggtctcgatctcctgatctcaggtgatccgcccgcctcggcctcccaaattgctgggattacaggcatgagccaccgcacccggcccaactttcttctttaaagcggaaaggaagcgagcgctctgcccccgagcaccctcccaggagcctatgggctggttcctctttttggcttcatcatccttggagggccgagcgcagcccctgatgccgcagggcagggttgggcctgagggcccgtgtggccagctgctgtctcaggatgcagtaccctcgaaggttgggggccaagtcccagggtctccaaggtgggctggggaagggtctcggcccccctcagcctgcagagagtggagaatgtagcaggtgcgcagccaccgccaggattagcttcctgtggctgctggaacaaacctacaagtcagaagccagatgcgagtctcatggggctaaaacgaaggtgtcagcagggctggctccaagggggaacccactttctgccttctccggcctccagaggcctccacattcctggccttgcagcccttcctgcgtcctcagagccggctgcgtggcgttctctctcccagccccacttctgtcctcacatctcctccctgactctgaccctcttagaagaaccctgcaattgctgcccaccaagacccccagcctaggcatgtctgcaaagtcctcgtgaaccgggaaacgtgacaccgccacaggctccggggttgggatgtggcatctttgggggccatgattctgctcactgcagaccccatgtggaggtctgtaaggccaggggagtcggggaagggccagggcctggcctcggctgagggcttccaggatgtggcagtggtctggggtgaccagacagggtttggccagcaggcaggaggaggctgcgcagagccaggggtgtcctggagaggtgtccccactccccaggtgggaggacaggggtggaaagggctgttgggagggacccagcttcacccttggggggcaccttggggccatgtgcaggccagatcgcaggggtgggctggagatgagcttggggatggcagaaccgaagaagggcaggactgggggagggccgggggggctgggctttagcctcgggtcctggggacggcattctgaatatgggaatatgggccgtgttggggtgtattcagacacccgctcagaggtgctccaagcagcaccaggcccctggctgccaactctgatattgtcactggggctctgagggctgggtgtggacaggctccttggctgggaagccagtgtcctctcggggcatagctggcatggccaggatccacacagcaatgtcttccaagaaacgggcccctggcggcggctctgtctgccctgttggatgggccaggccttcctgccttccgtttggacacctgcactggcccaggcagggtcccactgtccctgggaagtcccagaggagggcctcggacagaggacccgtagcagtcgctgcgtgtgggatgggcccgtggatttgggctcagcagcccctctctgctgccccaccccgagtcaggccagcacccccggccctggcagcccctgctagaagctgtggcagcatccaccgggaaaggcccggctgccagcacagctttgagtccgtcaggacctgctgaggctgccaggagcaccctgtaccctgcaggtgcagcgggtccagggaggagggaagccttgctggacatgccttggggcccccaaagggccgggccggtcacctgcagtgagtcaaggcagtatccttggtggagcagatgaggaaactgaggtcggagtggcaagcaggacttggcttccccttgctgccgccatccggcagggagacagtgacaggcatgaggagttcgggtccaagtggggctccgcacagtgggggcagctcgccagacacgtggctcggtgtggggcccctgctttcatccaccttggaggaggccaggccgccccctgccccagagccaaggagccctccttcccatctccctgcggccctactggagtctgggtccagggttctggggcctctccccacccatgttggccacacatgcccagcaagggtggctgccagggatgggcccagctcaggacgggacacaaacctgtccctgttctcttccccagggtggacgctcttctctggctcctgggattggctgtgaggacaaaacataagtaaataaaatatgccattttctcaaccaagagagtggattcctttgccttgtccggtttgctcttctctgagcccagctcatctccagctcgatgtccccaccgaggactcgggcctcaggtcccagcttttcctgcctcttcccaggctccctcccaaaccctccagagtccccaggaccctcagggggatctgatgactcatgggaaccctccctgagcaggctgtctggactggtagatgtgcctcagtggtgatgatggcagccgggagctccgtgtggggtctgaggggctcgttgctgagccgggttcagggctggaggtgcccagcccctgggcccctgtggggcatcaacagtgaatgctgctcttcccagagtggacagagtctctaatccgcctcgctttccgtccctaattcaggcctcggcacagacggacaggcctgtccctgttgcttctggtctgtggggaggggattgtgctgatgtgggccctgccctggggctgctctttggggctgggagacaaggctgaggctggtgtgggcctccgcgcctgtgctgtgtgaagggctcagcctgaagagactgcacggtggctggaggcccccaggctctgagccttcctgggaaacgttagcaagatcccagccgctcagaccccacactgggccaaggcgcgaatgtcctgaacactttcactgccgttcgtgtcattgtcacctgcaggcagagacagactcttgagggaaaacacagagttcagtaacgaccatttgcctgcagttcaagggactccctcttttcaattttagcggcagataccgcagtccagctggtgacatccccaaccagccccacctggtgtctggtgtccccaggctggccagtccccagaacagtgggtcttagggaggcgcccctcaccctcaagggtgggcagagcccaccctgccttcccggtgctgtggaaaccaccctgccagctagcagcacctgagccaaccgccttcctcccaggggagcccgggctgtacacggcctgtggctgggacctggtttgggtccggctgtgtgtggatagaagaaggaccctggctgggagtcctggcctgccttggccctctctgggatttggtttccccttgtgcacacagggctttgtgacatttggagaggcgcatggctcaggtggtttcgcaggcggtcatggcttccacctgcaggtgccccgcagctgacctcgtgggggtagtcagggcgggacccccacaccaccgtggtggggggagggggtggggttcatctgggcaaccgcaggtgctgtgtgggaggaggctggagaggctcctgggaggggttcggcagggacgcggtcaggtccagcccggtttcttcagcccagcccgtgcgcctccccgccccagcccgtgtctcctctttgcccccagaggaacccatttactgttacaccccgcacaacttcacgcgcgaccaggcgctgtacgcccgcggctactgctggacggagctgcgggacgcgctgcccggcgtggacgccagcctgtggccgtcgctgtttgagcacaagttcctgccctacgcgctgctggccttcgccgccatcatgtacgtgcccgcgctgggctgggagttcctggcctccacgcgcctcacctccgagctcaacttcctgctgcaggagatcgacaactgttaccaccgggcggccgagggccgcgcgcccaagatcgagaagcagatccagtccaagggcccgggcatcacggagcgcgagaagcgcgagatcatcgagaacgcggagaaggagaagagcccggagcagaacctgttcgagaagtacctggagcgccgcggccgcagcaacttcctggccaagctgtacctggcgcggcacgtgctgatcctgctgctgagcgccgtgcccatctcctacctgtgcacctactacgccacgcagaagcagaacgagttcacctgcgcgctgggcgcgtccccggacggggcggcaggtgcggggcccgcggtgcgcgtgagctgcaagctcccgtccgtgcaactgcagcgcatcatcgcgggcgtggacatcgtgctgctgtgcgtcatgaacctcatcatcctcgtcaacctcatccacctcttcatcttccgcaagagcaacttcatcttcgacaagctgcacaaggtgggcatcaagacgcgccggcagtggcgccgctcgcagttctgcgacatcaacatcctggccatgttctgcaacgagaaccgcgaccacatcaagtcgctcaaccggctggacttcatcaccaacgagagcgacctcatgtacgacaacgtggtccggcagctgctggcggcgctggcgcagtccaaccacgacgccacccccacggtgcgcgactcgggggtgcagaccgtggaccccagcgccaaccccgccgagcccgacggcgccgccgagccgcccgtggtcaagcggccgcgcaagaagatgaagtggatccccaccagcaacccgcttccgcagcccttcaaggagccgctggccatcatgcgcgtggagaacagcaaggcggagaagccgaagcccgcgcgcaggaagacggccacggacacgctgatcgcgccgctgctggaccgctccgcccaccactacaagggcggagggggcgacccgggccccggccccgcccctgcccccgccccgccgcccgcccctgacaagaagcacgcgcgccacttctccctggacgtgcacccctacatcctcggcaccaagaaggccaaggccgaggcggtgcccgccgccctgcccgcctcccggagccaggaggggggcttcctgtcccaggcggaggactgtgggctaggcctggccccggcgcccatcaaaggtaggggcagggccggagagaggggacgggggactgggggtgggagaggcgcccacagccacagcggcccacgggagcctggccagggcgctagggaagggagggggcctggcttgaggccccctcaaagggggaagggaggaggccgaggtttgaaccggctccatcaaacggacttactgtcaaggtgagcctcaggccaggcagggccctggagacccccccgggaggcaggtggggaagatgcaggctggaagcgacgtgctcctggtcagcttcctagagctccgcgtgcgtggtgcagccaagttcctcgggtgaggaaattccaccgacggcactgcggctccgggacagtggggcggggggtgttcccaggccaactgctgtgtgcaggggcgtccaggcccagcgtctccagggcgcttcagagccgtgagccctgctcccccgccagcctgcactgggtgggcgctgggggcggcgcagcggaggatggtgtgagatgtctgtgctcttggctgtttgcagatgctccgctccccgagaaggaaatcccgtaccccacagagccagcccgggcagggcttccctcggggggcccgttccacgtccgctcacctcccgccgcccctgctgtggcccctctgacaccagccagcctgggcaaggcggagcccctcaccatcctgagccgaaacgccacacacccgctgctgcacatcaacacgctgtacgaggcccgggaggaggaggacgggggcccccgcctgccgcaggacgtgggggacctcatcgccatccctgccccacagcagatcctcatcgccaccttcgacgagccgagaacggtcgtgagtactgtggagttttgagggatggcaccgtccaggccgccgagagcccctctgcctgtgtcgtgtggcctggccagcctcccggtggacaccagccctgcgtggacgtggcctgtgcttcgcccgcactgcgcgcatccccaacctctgtccgcatgcctggggccttcgcccccacgtgctcgacaggggaacccgcccggacggcatcgccaggcactggctggggtggggaaaggtggcccagtggagccggtggccaggaaggctgaagcccgcttcccatgctcctgcatcaggtgcccagccgtgggtgggggccctgaggtgaagagtttatttttttagtccgtttcgtcctggccccgggctgtggcgagacagcccaactcccccagcccagctcccccagcccagagccagggaagaggaaggtggggccagtcccaccagtggggtggccacgcccatggggtcacatgctcaggggtcaccccctgcagggacctgatgccctcgggtgggagggaccgaggtccaccctcgggtcaaaggtcaacgtgcactttctccttgtcgcctgacagacattttattttactaagactgctgtaccgaacaagcatatttatcatcaggagacaggatgggtttaaagcaggatggtgtgtgtgtgaacgggcatgagcagaggtgagcgtgagcgagcgggtgtgtatgtacgagtgtgcacgtgtgtgcgtgtgcacagagggtgtggtgccagcttgagtgggagtgtgtgagtgtgagcaggcgggcgagtgcgtgagtgcacgccagcgcgtggcccatgtatgaggagtgaaggggcccaacgcaataaccacgtcccccacccgggccccccgccgcggctgaggccacatggcttcctgtgggagccccggccggcacccggctggtcccaccccaaatacctcagccatggagaccatgtcatgcagaattaacaaggtagcaccgagcatatcaataaatattattctgataatca

SEQ ID NO: 103 - DNA, 48324 bp, Homo sapiens
gcagttcgcctctgcagcctctgcggggaagtgccggggctgctcgaggctcagttcttaggactgcaaggaggcagccccggcgtgcggcggtgcgcacagtctagagtggccagggcgcgagagtgcaacgtcctcctggccccgagcgcgtcgtcgcgccccgggagcagaccctcgcccagcagttaccgccgtcccgactttccgttccagttgcagctcctgccgggcaacatgtcaagagccgccgccgctacagctgccgccgccacctggggaagagcagcagcagcagcggcggccgcgggcacacgggggcaataaaccgagccacccgggcgtccagcgtgccggggaaccctctctgcgctcactgcccggcgggacccacgccatgtgctgagccatgtccctggccgcgcccgcgggcagcgcatggggcagcgcctgagtggcggcagatcttgcctcgatgtccccggccggctcctaccgcagccgccgccgcccccgccgccggtgaggaggaagctcgcgctgctcttcgccatgctctgcgtctggctctatatgttcctgtactcgtgcgccggctcctgcgccgccgcgccggggctgctgctcctgggctctgggtcccgcgccgcacacgacccgccagccctggccacagctccggacgggacgccccccaggctgccgttccgggcgccgccagccaccccactggcttcaggcaaggagatggccgagggcgctgcgagcccggaggagcagagtcccgaggtgccggactccccaagccccatctccagctttttcagtgggtctgggagcaagcagctgccgcaggccatcatcatcggcgtgaagaagggcggcacgcgggcgctgctggagtttctgcgcgtgcaccccgacgtgcgcgccgtgggcgccgagccccatttcttcgatcgcagctacgacaagggcctcgcttggtaccggtgagtttccctgccaggggcagggtctccatcgtcgattcagaccctgagctaagggagacatggcgtatgatagggaattggcagggttacagcttcggaccacccggggtagggcagggaaactacggcagattgcgcagcgcatcctgtccgggtgcggtgagggttgcgctccgcttggttctcgtcacaacccacagaaagttctcgcggagcactggtgcccttgaattcatcaggcgacctcgccgcaaagaagaagggcagcgactgagaccgccctcagcaaagcgagccaccctctaaccatgggggtatccgactcgaatcgtattttatgactcgttttaaattttttcctcccggagcccgagacgctgggaatgttctgagcccctttggtcggtctccgccctcaaggaacttctagagcagcttctgcttcccagatggggagagggggtgggggccgcggcgtcccggcgaggccgcagagtctgttaactttttgttacagtccgcctggttaccggaaccccaagggtgtcagacccgcctcgctcgcgagccgcctgggctcgggagggtgagccgggcgggtggcccggcgcctccgcctggcgggcgggcggcgcgcggagcgtggagctgtgctggtccctgtcgggcaaaggcgcgcactgcaaccggctggagcggcgcgaggctttgaaggcgtccgggcctccgggcaccgccgcccgtttccgcctccctgccctcggtgctgggatagggaaagcaaggacgcgtgtctccgcggggcttttacacgtccggagcaaagaatattcggggcccattgattgagaaatgagggttgcttcgaggtcgcggcttccggaaattctgttctcgagtcgggttgcgggtcaggttccaaagggacagtggccccggggtcacaatcactacctctgcccactgctttccgcagctgctggtctttggggtgagctgttgggttgcccgagcttcgggtaaggcgcgagtgggcaggaggtctagatttcggcctccgataactgtcttcgactaggggcccaggtaacgacccccacattttcgttggggtctccacccgtaaccccagccagcacgacattcagacacccctccaggcccaattagcttcacagacgctcaagacttgggaaaacaaaagaggagaagataactgaacccctctccctgtgcccaccccactgtcgggacctgggtgggttggagaataaaagagggctgaccccgcggattaaaacggctcccttcccagcctcgtcctaccccttcccctttgtccttaatggttttttattattgtcaggagttgcccaagtctcgaggtttagccaaccgtgacagtcatctttcccaccgttcccgggctgtgacccattctcgggacactggtggataagaatggggtctctggagtccgacgcctggattcacgtcctggctagtcgcgtgaaccttggtgctctcatctgtgcagtgggaataatgcaggttctgggcagggatgggaagagtgaatgcgctggtacggtaaggtgcctcgcaggcacgtgagggcctctctaatcgttagctattgtcaccgattgtattgttatgacttctaccaccaccactccccctcctcctgggatggtgattccagggccaggcggcaggctataactagcgcccttccaggtggaacccgccagagccccgaggcagcctaggattttctgagatcagacacacttgggccgggttgggaggaactggcaggaaaaggactgaacccttaatgtcaggcggttttgaagcacctggggcaagctatggaaatccccacaggaaggctcacgcagtctcttaggcggctgccctccacctgccacgttctttttgattgactaaaaaacgctgaatgaagaacgaagtcgcgtggaaaccctcgccgcgcgcctgcagcggacagcgcagcccgggaggttcggctgccgacttgcgcccgggggctgcgctgcgagcggccacgcatggcggctggacccgggcggccgcaagggcttggctgggccgcgggaggcgggaggttcttcgtcctcccgagccatctccctgaactgacaagcaggactcccgggtccagggggcacagggcccggggcggtgacccggcggatcgggctgccggaggagcccactgtaaatgccgcaactggccccaaacactgcgttcctggactgcaccagcagctcctggcgcggccgcagagttggtggatattttccaagggggaaaaaaatcttttaaatgccatctgtttactttaaaaatgttgattacttaagaaaaacgaatggatgtctgggcaaaggtatggacgtcacaattattttgaaggcgtcctttttaactttaaacagaccacgccaggaggagactgctgacccagagcgcattacctaaaatctggtacccagagtgcacccttcgccctcgttggagttctctcctctctgccaagctttgctccgtgccagaggtgtgctccattgtacctccgctctgtccctgcagtcaggcaaccaattggagaagagtataaatagtaattaaccagggagagttgtaattcagaaacctagttaaaacaagtcctcaaaaactagagaatatgagagtggggagacattttgaaggcattaagaacaaaaaacgatggggacgaatggttgagtctgaggatcagcatcgtaatctgttagagaacgaggtcgtggctgtgtctgtgagtcgttaatgggtttaatcggttgatacacagcctgctagtggcctaaccagtaacccagggcctggcagatttgcatgacatctcggagtttgattgctcttccttccacttggcaaaaggagacaccatcagccggatcaggaggggtcatggtgagatggaacccaccgaggtggtgtacagagctggcgctgccaatggccagagtggcagcctttctacctccttaaccctgcaaaaatcaaacgtgctagtacgcactgtccatccacactggaactccagttggttttagtctgcgatgatgactcttctgggttgacttttccagttcattatgcagccctcttgaagcaggcctcccaaacttagcagacaccaatgagaacctcacaaagaggctcatcaagcaggctggtgaaactgggtgttacttcctgttccatgggtaccccatagtgtttgggaaacaccgggctgtggttcaggagaatttcacatatgctaagatggagaaagaacctgccctttacatttaggcttgggatgttaatttaaagtttgaatgaccaaaaattaaatctgtaacttttaaagtttctctttgtgattttacttaagtgttggtagatattcttaaattgtaatgacctcagtttgggaattaagttagccaaatattgtgtaattattgtttgttatacaaaaatatgccttagactgtacagcggcagaaactccctctaccacctcggtccccctttccattctgcgttatacaaaataagctgacacgttaatgctgtggcccacattaaacaaagtataccgtacgtgtgtgtgtgtgtatgtggcataataaatggtggtagctaacacttaccgaatgttttccctatgttccaggcactgtttcaagttttacaggattagcaaatttaatcctcattacagttctgtgaagtaggtacttttacaggtgaggaaacacaggcacagagaggttaagcaatttgcccaagatctcacagctgggaagtaccaaagctaatataccaacccaggcagtcctgctccagagatcgttctggaccattctggatcacacttcctcgcttaagtgattgaagcaagatatttatcatatagcatgggtccaaaactgagtttgctttagaagagtttgacagctttctgacatgcctttagtggtctcagcgcagactgcagattttgtcattcacttgaaaagaatatcagcccccaagcaggatagttactacatctaacattggttaataactagagtgaggataatcacaccaccgtgtcagtttcatttttctgcaaaggacagttagaatcaagggagtcactgacatggcaaaaaatccctcaagcatccagacagagaaaacatagcaagtgtccctcttgaggagatttatcctctgccatttgtcctttttaaggctgggaggaggatgtgaggttaaatgacacgttccagaacttcttggaattaatttattcataaaaagagtgcccccaaatcaagttcataattaacttgtactgattaaccagcagacaattatagctaacacttttggcagattcatttagaatgaacatagaaaaccctgtaacttcagaaatctctctcttgaaagctaatagctgaaaatagctatattccccacattttaaatttaacaaatgctgagaaaacaaaattgcctcctatttttctagtctacttcagaaaacctggtagcaaagaatgtttctgtcttcactgagggaaatttaagataagatctggctggggataatccattttgaaggaattacactctcttagtcccagagtttaaaccaagtatgtaactcacttccaagatgctgggtgaagataaaaaaaaaaaatctacatttgtatgcaacaatttgaaatacaaaccatcatgttacaaagctctcaagatttattagcaagacagtggagcatgtgttgaactctgtttttaattaggcacctaaattagaccataaaatggttgattaatcttttacaagttgaagggaaaatataacataaattaacctaatcataagtgttttcccagatgctctgagttaataaaatagtcaaaatttaatagcaacccatttgttttagataaatatgatgctaaaatatatgaattagattacacttattatcttccaaatgatatgttatcattgaacaggtctctaaaaattaggttgcagtacatgtcttaaaaatatttatcaaaatagaatactacaattaggaattacatgttggctaaactagattatgttttttaatggaaactgataattgaaaatttacaatttagcatagactagtatttgtgaaagatatttttccagctagagttgtattgcttgaaactttaaaatgacctgtcacagcttctgtgtttctagtttgatgttttagtctgaaaaaaaaaaaaaactttttaatattttgaaaagtcaatatgtcatataacgtcattccacatatgtatgctgatttatctttttgtttataatatgttgtaggaataaggttttctggttatatgaaatgactccttgaatcactaaaattatttataattaaaagcacaccaggaatttttttaaaaactcaccagtcagctagttttatgaatcagggaggtggcatttatttcaaggttcagaactgaaatacgtgactcaggctgcttgccgactggtttctatgtcagtagttttttgaatactttatgttctcactctatgaacatggaaattaagttgattgacagaaacacaaaatgcctactctaaaggcagggcataatgagcatttcttttgctgtgaatagagttagtttccaaacagggcgctacctctctcatttaacagtcgatgatttcagacagtaagagaaatttcaatcctaggctgttgggatagtcaggaattccagcaaaatgagtcccccaagtatgtggcatattttcaagtttaatgaaaacaatatgctgcctacctcgaatgaaaacatttaccatgactgaaaagaaaggagatactgatatctttgaaaactaattgtaagtagagcatgaaactttttatatatttaaaacattaccttgttggaactctcgggtttctctcaaactatgccaaaacaaaactaacatcaaataaaactgatgttcgtgcatgctgatttttatttctgatttttcttgtcaagagatttggggaaaagtttaagacgtgagaagcaattaccatcttaataaaatgataataaataatttttatggcagccaagaggctatgtgttaaaatactgctaatgctaataaaacccaccattaagtttatttgtacatagataaaagtggtattaatttcctttataaattcttttaaatacaaatttcacgcacatttcggtaacttgaaaaatattaaaaatatcttgttactggctcattcagaaaatgtacttcattgtgtcatggatgaaacatgtttaaatagcaaagttgtactgcacaggttttgcctcccaaagattgctgtttgtaaaaattatgagtgcgtatctttagatttagagctggttaaagagtactgtccgagaggagtttatattttccggacagtaaaaaaaagtacacacactatacattgttggaataagatatttttgttctaaatatggcaaatgtgaaaaaataagactctggtttaacatcaagttgattgtgtttcagcccagactctctcgccaaggggtcactattttaaacgccattgcccagaatgtgaacgattccatgtgtgtccatgaagcaccttacacgtaggattcagaatccctgttttctcccaagtctttgccccacactgcttaatactgttacacttgcttagaaacccataaaatgctgaaagatggttctgggcaatgtgaggtttgagaagcaaatggagagtgaaaaaaacattgggaagagcagtgagaatcccactcttgatttaatgaatggagctggggggagagccgcccccctttttcaggtctgcggacggaagtgtccagcagggccccagctgcccccgacgttgccacgtgtccgctcctttcgggagctaggggggcgttggcttggacatcccgttctggaagggtggccgggggcgctaccacgggcggggaaaatggctccgagccacccggcctcgggcatcaatcgacgcggccctggtgtcgcgcgggatcgccgcctctggcccgggggccgctgagccggagacagatggcggagcttcccagtgcgggggcagggctggcagccgagactggggccgcctcccccgcccctaggctggccgggtagtcctccgtggccacgtgaccagcctcgccgtccggcctcacctgttgggctgagcctggctgagcggcccgcgctagaggtgggcggtgccggcgggacccgtcttcgcgctgattgggtggaggggctgcggagagaccaatggtgttccgcctgagaggagaaccccgcccagagaggcgggctgagcgggcgcgccccgcccccgccggtgttggcctggctgttggcagctcagcttccactcggtgctgctgatttggtcctgagctgccttcgctttccaagtcgagcctatcagctgttctattgtgctctcttcctttggttcctctctctttgtcctgtctgcaccctcctgcacaaattctcctgttttctggagcggagatgtctgttctccgaatgttcggctcccgagtcctgcagggagaccgtctcgccttctgcagccctggctggcaggacccgagtgggcccgagtggattatttacagccgaagaggacacttcggctttttcggaccttattttgggtctgggaagcgggaggggttgctggcaagaaagtgaattcagttgagtcaatttgcaacgagcacgtttcgtttctcccttttctccgcccccgtttctctttggggggaagaaatggataatcctctttccacccacttctataatgggtgcctgtaaggcgattccgcagattcagtggataacagaaaataccttcatttccataatttggcccattaaatgacaggacgaagagaaagtgggaaggactgggatggagaggaggaagaggaaaaggccagtatctcacaagctccttccgatccctgaatctcacctggactcagaccgagtggcacgccccctccccagcaccttccgcgctgttcacacacgccaggctcgtcctcctaaccctaagtcctgtgcacagagccctgtagccgcccctacccagagcaggcactgacaagcccacccatttctagtgctgcccaaggtggactcagcccacaaaggccccagccccagcctttgcggataggtttcctccgtggtgccaacaactcttgtggatttgaaagaggcaacctttttcctcgcgtttctaaaggcctatgaaaagggcacgtcgggaagtgcacataagacgttgaacatcgttgcatgagatgttgaagaagtacaagatttcgttcttccttccattaaagtacaatctccctggggagagacacacaaagtacacaattagagaccagtaattctcttccagatcgctcccggtgccttttcctagctaagcagcctctccctgccggtcctggccttgtgtaccggaaactctcttggctggatccagcccttcctcctgatgtgctgtcgggcttgtccctggtgccctcttctctgattgttccagtctgcctgcgggcacttagcatatgctagtgctgccagttgacacagatacacaaagcagtaaacatcctgttcccaccgaagatccccaagtgtgtgggtggatgggtgtgggaagggatgaggtaaagagagaaaggcagtgaagtgatcattaccttatcactgatttaaaatacttattaatggaggaagccaaaggtgaccatttaaaatccttttctatagtcaatgaataatacattcgtataaatcatgtttacttactttttcattcatctaacaaggattttttttttttaagacagggtcttgctctgtcacctaggctggagtgcagtggcacaacctctacctcctgggctcaagcgatcctcccacctcagtctcccgtgtagcagggactacaggtgcacaccaccatgcctggctaattaaaaaaaaaaaaaaaaaaactgtagagatgagatctcactatgttaacccaggctggtctcaaactcctgggctcaagcaggtcgtcctcctcaacctcccaaagtgctggaattacaggtgtgagccaccacgccagacccagaccgtatttttagagccgttttaggttcacagcaaaatttaataaagtacacagatttcccaaatacccatcagtcctacacatgcacagtctgccactatcaccatcctctaccagactggcacatttgttacaactgatgaacctgtgttgacacgctatcactcagggtccgtaggtttacattagggctcactgttggtgatgtacattgtttagggttggacaaacgggtaatgacctgtatcccacattatagtatcattcagggtagttttaccacctcaaaaatcccgtcggtgcacttgctcttatcaagtacaaggcagcacttaaaacactgaggaagtacaggagccatgaacttgtccctgagaagcctgttttagttggtggcttgtatgcatacctgtaatcccaggtatgcatcaacttgtatgcatcgtttctctgcagggcctcctcttccttgaagcaccacttaaaacaggctcgaggagatctgtaggcaatttaagcctgatgtttttacttttatttttgaaatcattagtcctactaaattactagtaaatctgaaaaccatttaaggaggaagcagaagcatgagataagatagtacaaatttaaaatgtgatttttgcattttacttttccaggagctttccaaagagagctaaggaagtaagaaggggccagaaagtcagcaactgtgtgattaaaaaaaaaaatgtcttagcctccgtatgcaagaacttgctgtgtgcaggcgagtgggccaggcgcttacttaatcttaacagcgatgcttcctgtgtgatttcccttattttccaagggaggaaacggaaactcacagagattgcctaaggtcatacagctgtatctgtaggtggctctacctcttggacctaaggaagaagggaacgactccctgagggcccttcaaactccataacttggaggctgtctacctgcctgaaattcaatgccgtgttccttctggaccagttttaagccatctcttctgttgtttctttcctcccaaagatgtagacttttccacttaaaagcatttccaagattctattttttcatccttttttctgtccctattctctttcactccccacacttgttcctagcctgtctctgttgctctgatgtccatgttgatggtggcggtcttcaaccatgccatccgtgtgccaacccagcactttcctgccatccctgtagcccttgccccaacatctgtgcatttgactccccttctctgaccgaggcctgctcccatcccctcctctaccaactcatcccttctctcccacctgccctttgtgctgccccccacaactacaccactcagggtctcagctcttgggatcacattgacacacccccacattttacactctgtggcccattgcttctgagctgtattgtccagcaccatgaggaccccacccatggagacactgggttttgtaccatccccagcagttgtgagtgaaaatgtcttttttttttttttttttccagagacagagtcttgctctttcacccaggctggagtgcaatggaatgatctcggctcactgcaacctctgccacctgggttcaagcaattctcctgcctcagcctcccgagtagctgggattacagacgcccaccacaccacacccagctaattattgtgtgtgtgtgtgtggtgtgtgtgtgtgtgtatatatatatatatgtgtgtgtgtgtatatatatatttttagtagagacagggtttcaccatattggccaggctggtctcgaactcctgaccttgtgatccacccgccttggcctctcaaagtgctgggattacaggtgtgagccactgaacctggccaaaaatgtcttatataaagctgatctggcccaccccaactttatgcgctccactgagaacttggcccttacttactctgcagctgctagccctgctagtcaccaccccttacctgtgccaagatgacttgtatgcattgcttctctgcaggacctcctcttgctcgaagcaccacttaatttagctcttcctacacaaaaggagaaacctcagagagatggcagcctgtatatgaacaccactctcttaaccacttctcgacatggctttattttataccttccccaagacttccctccgtcatttcttttcttttttttgagacgaagtttcgctcttgttgcccaggctggaatgcagtggtgtgatctcagctcactgcaacctccgccttccaggttcaagtgattctcctgcctcagcctcccaagtagctgtgattacaggcatgcgccaccacacacggctaattttgtatttttagtagaggcggggttccaccatgttgctcaggctggtctcgaactcctgacctcagctgatccaccagccttggcctcacaaagtgctgggattacaggcgtgagccaccgcacctggccccctccatcatttctaaggaggtgctgtgttatctcttttcagtattatttgaaagaaatctcagacattatattgtttataaatctgtggggtttgggtttctttttttgtttttgtttttgttttgagatggagttttgctcttgttgcccaggctggagtgcagtggcacgatctcggctcaccgcaacctccgcctcccgggttcaagcgattctcctgcctcagcctcccgagtagctgggattacaggcatgcaccaccaggcccggctcattttgtattattagtagagacagggtttctccatgttggtcaggctggtcttgaactcctgacctcaggtgatccacccgcctcggcctcccgaaatgctgggattacaggcatgagccaccctgcctggcctgggtttcttatttaaatttttatttacatacttatagaaaagtgtacaaatcagaagtgcacagcctgacacttttcacaaggcaaacatacaagtatgttgttggtaacaagcgccaagatcaagaagtggcagttcaaaaacccccaaagctacctctgtatccccttctggttaccgtccccatcccgaggacaaccactatctcaccttctaccaccaccagttagttttgcctgttgttgaatctaatataaaggaagcctaacagtgaatattcatggggttttaaaacatgcacatttactgcctatgttgacaggttgggaggtttcacatacaaatccagatttcctgctgcttttataaaggatcagacagtaccatgcctgtctttcttatggcaacaaatggctggacctggtgagcccctgggcttgtgaatgggggaatcgtctctccttccgacattctgccctccctgccccttcctgtctcacactgggcagcttctctcatttgttaccagagtggggagcttcaaacagttttcccacttttttcaggtatgtacgtttcacgattaaatttccccaatccagttcatcacgggcattcttgttagagttgggcaggagcttttatctatttgactttttcattttacacttttgtagggatcccaagagaggctgtgtggaggtctgcttagctggctgccaattaaaatcagaaatcaccttgatgaaatcattttcagtgacatgcttctcctattttttacttttttagttccctaactggcttttctttgatcggattccccagttggcaaatcttagggtcagccttttgctgtggatagtcaggtcactcagtcattctggtgtcagcagaatacccaatgtgtaccatagaaattggacccagcagtgtttcctaaaccagttctcagccaactctcctgtaggaccacgttttcccccaatgcactgtggctcaatatgttgtcctattgcatgtgatgagcacacagagcatgccgtgtgcctcctgccatacaattagcaacacgcacactggctagtgagtttactgatcatggccttggatgctgtcgcaatgtcaaattacttataatagttttaagtgcttcctctcaggttttgcatgtatctcctccaggacagtttgtggggagtcctgcagaccacactttgagatgcgctattccacgtttctttgagtgaagacaaagttcttctgggtgtggtggctcatgcctgtaatcccagcactttgggaggccgaggtgggtggatcacctgaggtcaggagatcgagaccagcctgaccaacgtggtgaaaccctgtttctgctaaaaatacaaaaatgccaggcgtggtggcgggtgcctctaatcccagctactcaggaggctggagcaggagaatcacttgaacccaggaggcagaggttgtagtgagctgagattgcaccattgcactccagcctgggcaacaagagtgagactccatctcaaaaaaaaaaaaaattaataggtagagggtagaaaaaaagagttccatgttagcatattagaggccctgagaaatactgtagctaaaaacaaaacaaaacaaatttataaattaaagtaaataaatgtttgtttcacctagcatttcccccatgagtacagaaccctcctttcattcataccttccagcatcctgaggcattgtgtctatccagatgccagcttgggccatattcgccaaacatgtttctgaggtttcttgcagttctaagagtctgacactaatcctgtgctcccgctctctctccatccacctttaccccttggagcaggcttcccgttcctatagcttgagttattcctctcccacacatctcccactgtgatgtcatctcaaacctaatatgtctgcaccctccccctggccccagatgattgctgcaaaaagaataaagagcaagaagtggagttgcagtgaatcaaggaccctggataaaaagtggctgaggctgaggccgaggccgggggaacagacttgctgattaggatttcaagtcgggtcttgctttgcctccacttgctgttattctgtaagcaggctaattgcaggttcagctttcctccaagcagcttatgtctgttttcaaaggtaagtgttctgtgtcggtggtgtttatggagcaagatgtttgatggtgttggaaaaggtgaagcttttttccaccctgcctggccctgtgtggcgcttgtggtctgagtatgttttatgctagcaccgagatgattgctcaacctggttgtaatgttgaggtcttcactaaataacgtgagtgccacatgtaaacattggcagccttgagctgcaaacgaagccaataactttttaaaaaaatgcattttcccccttttgtgtggccaaggggaacactgaaaagtgtcctgcagttcacacagcaccggaaacaaaggaaactttcagattaggtgtcactggggaaggaggctagtgaagccttttaacagagagagatggggattgatttacctgtttgtataaaactaaagttacaggagtatctggatttctcctgcaagcactctaagcttgccatagttatcttattatctcctgatacacttaccgtaggttcttcgtacttggggaaattctaacatctgcatggatcgcctgctcacctctacctgagcccttgctcaggaggaggcgtttggcaaggacatttcacatggtttgtgggtgaatagtttcacaccagagtgggatcctctattgcatgtactcgactagcttttcattcttatcacacttcccttcctataaagttacgtatcttttaaagggaaatttaatacccaccttcgctttctgtgcggccttgtgaaaatcaggcaataacaaggacagccttattgccagtgtatgaccagagcatctagatggcactactagtggaatgtcatcttgtctaccattcattcattcattcatgattttctctaccagacagttttggaactcctagaatgggtcaggtggtaggcaggcattgggaaaacaaggttttaagccattgtccaaatcctcaaagaactcaccattttggtcgaggggccatggtgagaggtgtatagaacaaagtaagaaatgctgtaggagcagagagagagaaagaggcccagagaaaaagacaccatccagctgggcactgaagcacggataggagcttgctggctggttgtcctggaaactgatcagaatattcagggctgggaagctctgtgtgaaaaaggcccagagaagcacagaagagcactgcagcttgggcaaaacggtgaaacagtgagggtgcctgggattgggggagagaggagccaggaggctggctcagaggtggagaggctggaatggcacattaaagagagggcttttatcctacagacaagggagtttttcaggccagcagagctcctataccagagacattcacaagctttatatgagttgtgaattcaaattcttttcatgtattttcagggaaaatttaaaaatttgtgatttcaagacagagaaagcagaaaacacatagatggttttctaagatgaaccacatttagccctgctgggtgattcgagtaaggctcccaaaggaacaagcagcagttcccgatggtgtttgcaaatatggctgggacatgcttcctcatccccactcattgcccctgcggaatccacacaccccctccctgctgcctccttgggtagcttggatgactgtcctaagcaccttcgttctgtggtttgaagtactgagggaaagagagccattcttctccaactccccgctcggctccccaggccagcttctccagcccgatggtgtggagaggcaggtggtctgcaggctgggccctgccacctctcctctcccttcaccagtcctgctgagagaggatccctgtcattcttccgggagaggcatgtcagcaggcgcagcgggagaggggatgagggaattgccacgtgtccacggctctctggctcaaccaggcagggttggggcaaaccttcgccctctgtctcagaattgcaagcagtctaaagaagccatgcttggctcctgcttgccggtactcccagtgtgatttagtcctgggcccatcactcactgtggaggaactcagctaagtttgggaaccttccatgttagcatataaaagtaactgcagttattgataaggtctagctcagaattgggttgccctgatcagatcctgtttctgtttagaggagacagagaagagaggctgagaggtagactcaagagggcacagccaggaggcagctggttagggggctgccactgtggctgggtggctccctgccctgactgtgtctccttcccatctgtctcctccaagggaatgttcagtctttcactgttatttttgggatggtgttttcttccagtcccagctggaaacagaagtacagaacaagcccatgactattttgtgttctgcgaaaagagcatttgccaggcagcagatgtactggcttcctcaagactgaagctttcgttggttttgaggactttgatggaagccacctcattttacccagatggtgtcttttggggatgtgggtttgggggatgggaagtgcaaaagcacatcagtgagggctgtgagttgtttgtggttgatcagcctccagatgtggcagatggatggatcgtaagtcccagaagctcaggtgcggagagaggcactagcagacagcagcggtctgggctgcaggtaaaggtgcctcctaagtgattgcaagctcaagtatagtggtggacttagattctgtctcacacattccctccgtaaacagttttctagcagcttgtcaattacattctggtttggatttggtgctgttttgtctccattataaaatcctttggcttctctttactcaataagagtgtattgagaggacaggcaccgtgtaccctcctcccagaggaaattgtcattagggcagtccctgaggattgattatatccatttggaagccaacagtggacacagggaagagggggaggaatcaggttgattccagctagttcttggtttctctgtatctgaatgtccactgattttcgtttcgtttcttagaatttaagtactgacattaatgtattgagcatctactctgtatcaggctctgggattcaaagatttgttcatttcacaaatatcactgggtacctattttatgaacactgttcctgccctcctgtagcttacattctagtagggagatgggcagtaaagaaataaacaagtagattaataaaaatataatgtcaccaagagtgagggggtagacggttttgtgggagaggatgatgggagaaaagggacactataggctggaagtcaggagggcctttttttatttcaatagtttttggggaaaaggtggtgtttggctacatggataagttctttagtggtgatttctgagatttcgatgcacccatcacccaagcaatgtacactgtacccaatgtttagtctttgattcctcaccaccctccccccgagtccccaaagtccattatatcattcttaatgcttttgcgcaggagggcctttttaaaaagatgaaaaggtagaaagatgaggactgagagggtcagagaggcaggtcttgatgtgagacgccagcgtgtgtggggctttatgagtggaagggacaggacctgtcctacattttagaaaaaccctgactgctttgcagagacagactgtagagcatgagaataaagggaggggtgagatggctaaacacagtatggcatgatacatgcaaaaacagaagtagttcaaaaacaaatcctacagagggagaatttcaatctatctaggcgggatggggcgctgcactgggaaggcttcagggaggaggtgacatgggagtgaagttttgatggatgaataagagttcatgagcagaccaggtgggaaagaagatcatggcagaaggaatgcatgtgaaaaggcaaggaggttcctaggaaaaaatatggttggtgcagggaaggacccagcagaagagagtgaccgcatgaggggagtcgaggatgtttgtaagtaagccttaacctcatgacattgaagggtaactagtacaggttatcctgtgcttatttttttttctttttcaagtatgtcagctcaaaagtgggaattgtcagatgctgttgaatagtattgaacagaaattgcttttgctggtgatcagaaaagatgccactcagaaaaaagggccagtgctggagatcctctcaggttgtgttccaggttccacgtcttcgaatctggttgccttttgcctgtctggaaggagtctttcattaagttgaagccatgtaattagaaattccatttctcagctccgcagacctacaataggaacagccccattggccgctcagttccagcattcagttccaggctgccagtgccaaaatgccaaacctggtaattaagaggtggctctgcaggcacacacctgttccgagtgtgcaattagtgcctgccgcccttcttactgagctcagccctctgcaccgaccatttgcagggacggtgggatgtgtgtgtacaaccttgatttactgtgctttttctgaacatcaaagtaagaaagtctcactccttttgttgttgttcaaaagagaaagtgtaaaggaaggccagcttggagtgtctgaggatggagtttgggcaagcatttggtggtggacttttccccaggattgctcactcatcagacactttcccgtctacgttccgggtttatagctaggctaatttaatttccagctgagaggctactccccatatgatggtaatctcaaatagttaatgagctagaagaggaggcagcctattggattgattctggctcctcggctcagtggtttagcagtactaatttattagcctgtttgtctgctggttcgagaggcttgtttagcctggcgcagcttcatgtatctcccgtcttctaaagatggattgagcttgacttctggcctctgaacctttaggatcagctctcttttccatttacacacttcgtttatttaaagggaagaaggagggcagaggggatagccctgggtcggttcgtgagctcacgatacctgtaaagcacattgtgaaattccagttctttccagctgggtttgtatcaccagcagagccttttaggtgagctgccttgagcaaccctggcctgtaatattagttccaggatgtgggtaagtggtgtttttcttccatagaacactgatggcggttgaaaaaaaaatacaggctaaagtacataaaacagaataagaattgggaacgaggaatgagggctgtggtttggagaggctaatctagttattttcagttttgtgatcatttgtttcagtgggactgagtgaaaaatgaactcctaaaataaaggcattagtgcggaagtgcaaagaactagtaagagatttagcttccactttctaaattaatttttctctcatatatatatatacacacatcaccatcattatcatcatcattatcattatcatcatcatctcttttatatatatatatataaagtgctgtttatttcattataatttataggccctataattccaaaaaattaatttaaacccaaaccttttttttttaattgtcggataggaaaagaagacaaaaacctctttagaaagggggtgagtaattagagatgagtcagaggtgggatggttactatatttgagcattttgatctaggaggttcttagaaatgtagagaagtgggatgagcatgagactcagagtttcacattctggattttgagtccctgctttgttacattgcccagtatttgatctggggccacttaatctctcctctctcagcctcaccgtcccattctctaaaatgaaggaaacaacccttcattgttattacattgagccagtgagatcctgaacgtctagtcctttgtggcaggtaaagcgctctgcaactcttagagctgacatcatgatggccaaggcagggagaaccatcttctgataaaaggtttgcctctttccaaggggtaaacttatttttctgtagcatgaactttgagtattggactggtatctttgcgacttcacaaaactgtgccgactcatcatttcaatgcttaataaaatataaaggcagatcccatgtgtatgtattgcaggcagagtgtttgggtgggcctaagtgttatgctaacctcccagatggccgaaatctagaaaacctggaagagtccatgtcctctctcccccattcactgacccctaacacagatcatgtcaaccaggcttttgaccagcagaacaaccaacccgtggctggtggacagctgctgggctgtgccaaggctcttaatctgggcccacagttgctctggagtctgtgaatctcctgaagttgagaagcgagatttgtgtctatgtcttttttttttttttttttttttgttgagacagagtctcaccctgtaacccagactggagtgcaatggcgcaatttcggctcactgcaacctctgcctcctgggttcaagcgattctcctgcctcagcctcctgagtagttggaattacaggcacatgccaccatgcccggctaatttttttgtatcttttgtagagacggggtttcaccatgttggccaggctggtctcgaactcctaacctggtgatccacctgccttggcctcccaaagtgttgggattacaggcgtgagccaccgcacctggccgtgtatatgtcttatatctgcattttgctgcaaagagggtccatccctttactcggattctccacaactcataaaagctccagagctctgctccttgggtactgcactggggaatttgcatacctttttgtagtcagcaagggtagcattctgtcgtaatatttaacaaggcctatttctattctgaacaagtgaagaatcatgtatcttcagaggaaggaggagcccaggaaaggggatcctttttaaaagctgtgagaaagctgtgaatcaggtccatagtcatttggggtacatttcttaggacaattcctgggtccatcttatatccccacttttggtttgcttctttaaccgtcatgttttatgtgcttttttttttgtctcataaagaaagctatctcaattccagatgcattgagataacttcatattgggtgtgaggaggctgataactacaccagctttatagctttgtggtcagttgattccattcctcagtttgttacctgatagtcctgactgtctccaagtgacaagtgaatcgatgtgcatttagcaaacccaggaaaacattgtctttggagaggtttgagcttgattaatctccaaaacgtgctaatggggcaatagagagctcagctcttgttctctccttcaggtggtgtttgcctgtgagcttagtgccctatgttcccagcccagggaattggaaattgattcatttgggaaagtaacagcttaaaggtctttatttgattttgtcagagaatagagaacaccgctgagcttttcagagagaggcagtaattattcttggtgcacccccgacccctgcccccaaccccaacctaggctgattcgtctgcccagaatgagcctttctggacccaggagcccttttctcgcttataatctggggttattcttaccttctctcagttttgatctgtttttacacatggagacaggacgtaaatcttcatttgtttataacatttcttggatgaacacctaaattcttcctcacccctcaccctcaaaacttcctgggttactgctacttctgtgggtgaacacagagtgcttcagtgtcatgccctccatcaactttgcttaaaaattgagggtgctccttgtccccacttctttctccacatctaacctgtcagtggcttttctttctatcttcctttaaaacgtttgtttgtttatttatttatttttagagataagggtcttgccatgtggcccaggctggtctcgaactcctggccccaagtaatcctccagccttagcttcctgagtagcaaaatgtttagaattagctgccccttcttttacatccccactgtcccctccccattcaaatctacatatttcgtttatttttatctatcgtttgttttttaaaaatatattttagagacagggtcttgctctgttgcccaggctagagcacaatggtgtgatcatagctcactgcagcctccacctcctgggctcaagtgatcctcccgcttcagcctcctgagtagctgggactacaggcacaccatcacacctggctaatttttaaaaatttttgtagagatagggtctccactgtgttatccaggttggtcttaagctcttgggctcaagcaatcctcccatcttggccttccaaggtgccagaatcataggtgtgagccaccattaaggcgattcttaaaaatgatacataaagcacagagagcacataaaacatgacagttaaagaagaaaaccaaaagtgggaatataaggtggacccaggaattgtcctaagaaatgtaccccaaatgactatggacctgatccacagctttctcacagcttttaaaaaaagaaaaccttaattacacaaatcacaaaaacaagctgtttgctgaaagggaaccatgactgttcttggtattaagccgaggggctggcataaagagattgccatggggcaatggctactggcacagatagggcccctccaagaagcacatggttaatccagcctttttgttaaaggatatttttcttagaaaaaggtaaaatcatgctctcatcaaggtatacaatgagtgtgttaaaaaccttatttcgctcattattaatgatggaaccaggcaaatgttaccattggttcaaaggagaagtcaaaagaatacaaatttacttggactttaattaacaaatagatgagaaactgacttcttccactgagtaggaggtagagaaaaaagtccagagaactcccaccagaaagaacttatttgtatatctctggtcaagaatcaagaattatattggattgctatattgctgtctatataatttagaaagttgcagagtctctcaaaagcaataaaaggctggagtcagataatcagcgagcgtgctctaaacagtgcaagttttccactggagacacctagtgatctttttttgcttattccaaatttctttacattttaaaaatactggtcttagtaggctcgcggagtttataatcagctcaaagcctaagcctgtttaagatacgctgctggtaagtgctggctccctgacgcctaacaaaagattttgatgccgccaacctcctacattttatgtggcttctcattgcctcagaggtcaaatccaaaatctgtcttagcatttgttcctgcatttgtttactcttcctttatctagcaactgtttatttttgccacagtgcaaataagccagtcctcacccccttggaggactgctatagtagatggatagaggttatgatgactctgtgtgtgtgtgtgtacgtgtgtgtgtgtgcacgcacgtgtgtgcgtgtgtgtgtgcattttcaggaaggatgttgggaatgtaatagttatgaaaaaggaacaaggagtgtatagaaatatattagaagaaggaggtccagaaagaatagtccaggaggagggaagtccatgggggccaagaaacctcatgatccactggagaaaccacaggtgcttcctgatagctggggtgaagcagagttggaaggagggttggaaagagcgagggaggaacttagaattcccttggagtgaattcatatatgccctgccagggagtttgcaggtcattctcaacacaacgagaagctatgaacatttccagatttggcttttggaaagatgtctgtggaagcaagggatggagggatggacagagtggatgagggtattcccagcctgttttccaatccatttttctaaccttatttgccatcatgtcttaaaaacaaatacaaaaacaaaaaacaaaaacttcagtccaggctaagtggcccaatggctgtctcattgagtaggctttgttcatgttcctaaataggagcatcttttgttcctgatttcttcacttccacctactcttggggcaggctcaggggccgtggctcacgcctgtaatcccagcagtttgggaggccgaggcgggtggatcacttgaggtcaggggtttgagaccagcctggccaacatgatgaaaccccatctctactacaaatacaaaaaaactagctggacgtggtggtgtgcacctgtaaccccagctacttgggaggctgaggcaggagactcgcttgaacccgggaggtggaggttgcagtgagcagagatcgtgccactgcactccagcctgggcaacaagagtgaaactctgtctcaaaaaaaaaaaaaaaaaaaaaaaaagaagaagaagaagaagcttcagttgtcccgagcacaacttctgggtgccaatttttcacgtttctcattttcgagtcaagtgtataatatctcttgactgtgtctggaatttctctcaacataaacggtaagtccctggagggcaagaatcatcccgatcaacaacacacactggccatatcactgactccttcatcattatgacaaatattaaagttgaattcgagtttcctttcctcttgctgctacctaggaggcatttgccatcacttgagggatgcttgggaatgcaaactaactttaataataattaaggcaaaataataagtaataattaacacaaatctgctaattagtgcaatttttctcattgttattaactgtaaccatttattagtctgaacagatgttgattactggccaccagaggtaaagcatcccaagttcaatggggggagatgggctcagagtttgctgtgatccacaggtaaaataaggaactctgatcttatcacatttgttgtgtgtttttgcttagcatttaagttcaagacttttatgggtatagccacttaatgtcattgcgtcacttaatgtaatgggtgtgatgatacatgtatgtgtcatctttggacatctttggacatcaggatactgggaccatcacccttttgaatcctggccccacctgtttattattccaagttgcccttgattcacccctgagtttcttgacatatttgcatcatgacctccagtcattagctttaagccttgctagttgattcattttctttcattcatttatttgttcattcaacaaatattttcaagtgcttgcgatgcctggtgttttgctgtttttcttgtatttttttaaagatagtctttaaaactcacagtctaaacaaatacgagacaaaacatggaaggcaataagctgcaattaaagattttgtttttggaaatggtcattaggcttaaaaatagtcacagggtcagtttttcacgaagccaatgcagggtaaaaggctaatctcacttgtaattcttagcagctctctcactgatggtttagttacttaatctccttggtgtttactgtgtcgttccttacgggtgaagaatgggagatgaacgggaatgctttgtctaaagcacagaagagttgctggaaattttaagactcaccagtcaggcaacatcatctatcaaaaagttctcatagaatgtaacaaataatcatggaacctactcaaataatgcagaacctttgtccatagcttcaggcctccaatgctttccttctctctttggatgtgaaatgcacaaggcaggttggactctgtatactgatctgttgcaaaggtatcgggcttttagaataaatggttgaccatgacaatgaaaagatgagaatgtagggaggttgggcttacttttctcctgctgaaagttgattccgggtagcatctgaacttcacaagctgagaattccaataaatccacaaaaagaattcccctagggaagggggtgtggactttaattgatgatgtccaattagagtttccattgacattgccatgtctcttgttttcttgagacatctcttggtcaccctcaagcatatgtacaagccagttaggaagaagtaagtactgatgacaagaaggagtgtgagatgagaaacagtagccttttctttgtctgtagcatctcaagttttatagtctctgggatcttctctctgattagaaagtgcttcttttccacctggcaaggtggcacacacctgtaatcccaacactttgagaggctgtgctgggtggattgcttgggcccagaagtttaagaccagcctgggaaacatggcaaaaccctgtctctacaaaataaaataaaataatgcaaaaaaagagagagcaactgcttcattgcttttctaaaacgttgttgagctatttaaagcctatgataacgggggtttatttgcacttacttcccttcattttagttgaattcaagcttatgtcttcagatttttattgacttagttaccttatactgtttttagtggattgccgtgaagtagggttctgttggttgagcacaagggaagcagagagctggatggagccattatctcagacttaagtcaagcgctgattgaaatttctcttgtcccaaactcctagtggtcctgcactcaggagatagggaaggtcgctgacgatactgagtcttttccacagtgcttgcttctttttagcagcctcagatggatccctgcccctaaactggggctgtttctctccttctcaacctaattgtgtgccatgaggaaataaagaaagaaagagagaaagagagaaagaaagaaagaaagaaagaaagaaagaaagaaagaaagaaagaaagaaaaggaaggaaggaaggaaggaaggagaggaaggaaggaaaagagagaaagagagagaggaaggaaggaaggaaaggaagggagggagggagagagagagaaagaaagaaaaagaaagaagaaaagaaagaaggaaagagagaaggagaaagaagaaagaaaaagaaaggaaaagaagaaagaaaaggaaagaaaagaagaaaagaaaagaaaagaaagagcttgtgttaaaagctgcctaatttcccattcctccttggctgatcatctaattcattcagtgatgtcaaccccagaaggagactcagtttttctttgtctccaacatcctacaggggcactaagaaggagggcaccaaaaatggaatgcttcatagcacaagggaaaaattacaagaaatccaaactcttttaaatatttgttgttacttgaacctttaaatttaaaaaacgattttatgtctcttcttccttaacagcatttctctcatccagagccaaatgccaacggagacataaagagggggcacaagtgggattcatcccaccttacccttaggtaggaatttgctgctttcagagtgtattcatctacaaactacactggattcttggaagaatttttttgtaaaagtggcaggacaaatgttatccttttacagatgaggaaagatggcacagagacgttgtgcacttgcctgaggccacacagcctgaccttgaactccacttttcttttgattcaccaggctgagtgcctcattttaaggtacatttgacattgagcatcatctgatgacacctcctgggggtggtctgtaccaatgcccttggggtgcgttttgtacgtattcaaacaccaaatatttatagaggttctacttaatgtctgccagcttgtgccaccctactgctggctgtaggaggaagtggtatgtggggaggggtgggagaaagggtggttataataactttagagctgaggaacacccttttaaaccaatccattaatttttacacgcggagaactgagcacaagcttttgagtgtcttgtccaagtacctgttgtctgtggcagggcaggaactggaacctagagtttcatatgcccagtgcccactctgctttcattctgagcattgggcagcccctccccttgtcctgtttctctcctggtttcccggtgtgtgtgtgtgtgtgtgtgtgtgtgtgtgtgttgcttgcgggtggaggtttagtgattttcatcaactctgtgttgactggtgttgcagagtgttttgcaagctctctgggtgaaggccagtttacaaacatttacactgtgctaccaagggtacaagggaaggctgcttttcttgggaatgaagctgggagcagggaggggactacagaggcatgcgaaaaagaaaagagaattgcaagctgcttgctggaggaatggccctttgttgccagggaagtaacccacatagggctggagccccaccgacccagaaaaaagaacggtgttagagaccgggaagctaggactcatcagagacaaaacgttggcccagcgtgtgcagagaagaatctgtccaagcaggaaagagcagaactacttcaactgcagctggattttggtaccctcctccccttctttctgggtactcagctctgtcccgcccctgcccattggcagcactgattttactttctaaaaagtccgcttcccagaaaactcttgttctttctttataatgattttatttttaagttggattttgttttgcttttttttccccctaggaaataggacacaggatcattgatttcacaggatttgtcccggcataaacaggagtttgtaaggtcctgtaaacaggagcagtaccccagagagctcacccgcaaaagactattagcttttaattgaaaccctccctccacccccacccccagccccttccaggaacaggaacaggtggccattgtgaagcggggcctataaccgaggattctgccccaatgaaagggatcttgagttgacccagagaagcgagatgctcttttgagctccacccccttatggtattcaagggcttttcattttctgagcagtattgaaattctaggacaatggaggccaaatccttgtggtgggggttgggggctgggcgtggagaaaggagagagggcctggaagaggaggagggctcgggagtccatcccttgttatttttcttctttcctacccattacctttaaaacatttaaaaaaggaaagagaaaggcctagtaaacttttaatgaataatgacatcacttccgggagccccacggatcctgctgcgaaacctgaaattgagagccagtaactatttacaatttcagttcaaattattctaaaccctcccaaaggagttctttgatatgcaaacatctcccccaaatggagataattatttatggagatgtgggcctttgaagggagttctcagaaagggtggctttgaggcttcctaggaaaggaaggaggttccagataaggagtggcagggctgatacacatcttctgcccagcctcctcccgccaaaccccactccctgggatgaaagctgctttaaagaagaaacttcccggagttacaacttgcagttcaaattacagctctcctctgtcattgtccccatgtctatgttaagttttctgggaaaacttccttttcgcatccctggctgggtgtcttatctttcagtagatgaagaaaggggagaggagagactgtaacctttgtctttttgacccctgaggttccctgggatgtataaggtcatgtagaaagagcccaggctgtttttggggggtgaatacttaaggttagtacattggctttcggagaagacagtagtttaggccatgcttgctattacagaaaatgctgtgattaggactgtaatgaccttgcggcctactctttctttttcccttggattttcttttgaaaatgctttaacacgttggtctgaagtaccagatgccctccccccataacctgccagcgtcttccacctctaggacttgcctggcagcttggaagtttgcttcttggaagcatcctctaccctcccccattcgcagctaacctaaaagtctgcaaccgctcccaccgcccgttcaagctggtcacctgagtaggtggaatggaaatctttcctggaatggaaagattgagcaactggtccacggaatgcggagactgaaataagccctcagcttccatcccaccggttcttgggtccctcatttcccttattatcgcacttccttccccaaggaacagagcaggagctaaggatccagctccaagcagctgaggccaaggagcggcttgggcaaccccattcagcacggtgagggtacagagcagagtccctgataactgatgggcatcctttcataaaagaggaccttttatctttttttttttttttttttttttttaatgtcgtaggttaagacgtgctaactgacaaatctcagttgtaaaactgagaagggtttttctttttcctgagtgcttggcggtggttgctaggggtttcgagaccagcaaagctgcgcatgctccctgctccccaggaagagcccgcagctccaagaaaccaggtgatgagaataatacccatgatgttggtcttggttaaggagtgagaccctgtgcgtccccagaggagaaaatgattgttctcgtaggaaagaaactaaagagagatgggatctgtgaaagaaaaccagagccatagtagtcaaagcggtataaaaacagattttaggccgggcacggtggctcatgcctgtaatcccagcactttgagaggccgaggcgggcggatcacgaggtcaggagtttgagacccgcctggccaatatggtgaaaccccgtctccactaacaatacaaaaaattagccgagcatggtggcaggcgcctgtagtctcagctactcgggaggctgaggcaggagaatcgcttgaacccggggaggcacaggtggcagtgagctgacatggcaccactgcactccagcctgggtgaccgagtgagactccgactcaaaaaaaaaacaacaaaaaaaaacagattttgttcaacaactattgcaacaaaggaaaagagacctcagaactggcctcagttcttaatacagcatagacaagtggggatttatagccaaggtgctgtgggtgagggggcggggtagggtgttgggaggagtaggggatgtcttcgggcagggggtgagaggttatcagtggttggaaaattactaagaggaatcatcaggggtcgggggattctggctaaacccacctagccagattcttactgaagacaggccagggtgacccaacatcacctgggggatagtagaggctgagaaccttttttttctgagacagagtctcgcaatggtgtgatcttggctcaccgcaacctctcccgggttcaagcgattctcctgcctcagcctccccagtagctgggattacaggcatgtgccaccacgaccagctaacgtttctattttcagtagaggggtttcttcatgttggtcaggctggtcttgaactcctaacctcaaggtgatccacccgcctcagcctcccaaagtgttgggattacaggcgtgagccaccgcgcccggccaaggctgagaacctttaaatatcgatggtgatcagctatggaggatggggtattctagctaaaccaactcaggagaattattgctaaaatgggacattgcagaggcaaagagaatgacaaaagttgaggcgtagttgaaaagtttgggggagcctgagtcgtttgattgggagaagaatctttgctagattccagtgttttttcatggtttttttttttttaaattgactttatttttaagagcatttataggttcacagcaagattgaagggaaggtacagatatttatttatttattgagatatggtctcactatgtggcttaggctgtagtgcagtgaatgttcagaggagcaattatagccagtacagcctcaaattcctgggcttaagcaatcctctttcctcagggcctctgaggaactgagattacaggcgtgccagcacaccaggctcatcagggatttcttatatactcctactcaacccctacatgcataaactcccccattatcaatatttcctaccaaagtgatacaatagatgagcgtacattgacatctcattatcacccaaagttcatagtttacactggggttcactggtggtgttgcataatctatgggtttggacatacgtataatgacatggaagctacatgatattttcctacagggtagtttcactgccctaaaatattctgtgaatcatctctttatgcccctcacccaacccccaggatcccagtgttttctttttgagtttagctgctgatgtttgtcggtttatcaggcactcaaaaaactgcactctctattccctttgctctttttaagggggcatccttatttcctagacagatttgtgactgtgtagatgctgggaacatgttttgctttggagtggggaggggggaaatcttgtaaagatttctctttgtcacatttttgatttgtgaattctcagaggctggacctgggcttcctggaaggtaatgcagatgtgacgtcacaatttcctgtcccgtgctcttgggattggtgtgagaatagtttatcagaatgggctgaccttctgcagattccactgctgaactaattttatagatgaggaagctgaggcccagaaaggcccagaaaagctgaagctcttgggattggtgtgagaacagtttatcagaatgggcaaaacctctggagactccactgctgagctaattttacagatgaggaagctgaagcccagaaaagtaaccactgggacatgccgattaggagcagatatcttcaaaaaaataacttgtctttaaagaaaaaaaagcaacagtaaatatatcagttatatgaaaatttggccagatgcggtggctcatgcctgtaatcccaacactttgggaggccaaggagggtggatcagttgaggtcaggagttcgacaccagcctgtccaacatgatgaaactccatctctactaaaaatacaaaaattagctgggcatggtggcgacacctgtaatctcagctactctggaagctgaggcaggagaattgcttgaaccgaggaggcggaggttgcagagagccgagatcgcaccactgcactccagccagggcaacagagcaagactctgtctcaaaaaaaaaaaaggaaaaaaaatttctatgtctctattgatgattctttcatgtcaatcaatattttccccaaagcagtgtcaaaacaaggatttgggcaacctttggccctttcaaagggaacttgtaaaatcttcattggaagaggctgaataagtggatttgggggaatgctagaattgttctctatcttgatgatagtggtggttacacaattctatgcatttgtcaaaattcttggaactggacaccaagaatgatttttactatatctaagttaaacagtaagtttaaaaaacgagaaagagtctttgttggagttcagaaaacgtggggtatttctgcaactaaacaaggaagtcattttcctaacgggccaggagaagtgggtggggtgaatgtttcccttgctcttcccagttttcctcaattgacttggaagactgggcctaccccaactcaatgtgggctgcagcttgctctcctctctaaagcacattaacttccatcatctgttttacgtaaatttccaggcatctgtttgcctgttgtgagttaggttacgcccatttcaataatcttttttattgttgtgtaatttaccagttcaaacagtaacttcaattgctgggctataggaggagggatatcacccgaggaaaggaagaagcagaagaagatattagggcaacatttggtactgggtaacatcagaattatagggctttttagaactgctctggttcattttaatttcctacgcctttagccttcaaggttggtttttaatagtccacttctagctgcagtatttaagagccccagcaagagtggggatgttcagtggtaaagtctcgtgtttctccaaagccctgggaccgccattccccagtgggaaactgacttggcaggaagtcagctcatcttctcagctgaccactctattctggagaggaaaggcaaggggcagaggctatctccgactgcagatgaaaattctaaatcttcaaatgtgattctgagcatcctgcctcaatattgggaaaaaggaaaacaggaatttatgccattaattcatcttactttcatggaatttttttcttttaaatgagaacttagtgtctttctttccttttccttccttccatcctttctttctttcatttataaagaaaggagtttatttcttacagttctggaggctgacaagaccaagattttggggacacatctggtgagggccttcttgctggtggggactctgttgagtcctgaggctgcttaaggcatccgatggcgagaggctgagtgcattcatatgctctaaaagagcactgagattcatttgcagccacaaactcttatacaagcataaattagacaatctaatactagtattattctttacctgtctgtttttcttctgcttagggtaatattatttaacttttgatgatgaaagaattagatacctctgttagcttttctttatcacaccagtagaggtggacttatctttcttctagtttcctttcatttgttttgttttactggtagcctgattcatatctggtaaccaactctcagaggggtgtgtgtgtgtgtgtttaggggcaacaagtatcttatcctgattggatttttttttttttgagatggagtctctctccgttgcccaggctggagtgcagtgtcaggatctcggctcactgcaacctccatctcccaggttcaagtgactctcctgcctcagcctcctgaatagctggaattacaggagcccgccatcatgcctggctaatttttttttttttttgtatttttagtagagactgggtttcgtcatgttggccaggctggtcttgaactcctggcctcaggtaatctgcccacctcagcctccaaagtgctgggattacaggtgtgagccattgcacctgacctgcctgattggaatggatttgttcttttctctgcagtttgtagaccatcaggacacaagccctcactggccctgggaggtgatctacaggcagctgagcgtgtgaccttcactcctctagccatgactcaaatagctagtcttggattagctgaacaactttcagttctgctgacaatgttgtcttctcattttttccccccacgaaggtggacctctatacccacatagtatctccacttaggtgcacatgaatatcagcagaatacatgactagattatgacaagttccaggcccacagatgccacagcataatggtttccagtcctgcttgcacattagaatcatctaaaagaatcccatgttgaagccccacccatccagggcctgattcaatgggtgtggggaggggccaggcatataacgccagttaaaagcaccctgcatgatttaaaatgcttccagggatggaactgagtgccacagaggtggcgtataccatttgttttagacggagtcttgttctgtcaccaggctggagtgcagtggtgcaatctcagctcactgcaacctccacctctcaggttcaagtgattctcctgcctcagcctccggagtgactgggactacaggtgcgtgccgccacgcccggctaattttttgtattttagtagagatggggtttcatcatgttagccaggacggtctcgatctcctgaccttgtgatctgcccaccttggcctcccaaagtgctaggattacagatgtgagccaacacgcccagcccatatacctttctttgttttggtttgtttgttttttgagatgcagttttgctcttgttgcccaggctggagtgcaatggcaccatctcggctcactgcaacctctgcgtcccaggttcaagtgattctcctgcctcagcctcccaagtagctgagattacaggtgtgtgccactgcgcctggctaatttttgtatttttagtagagattaggtttttacatgttggccaggctggtctcgaactcctgacctcaggtgatccagctgccttagcctcccataatgctgggattacaggtgtgagccagcacacccagcctggcttatacctttcttgaaatatccttaaacaaattgaaagcctgaaatactccaaatcctcctggttctcagaatcatgcactgtggcccagttttttgaggccactggtggtcctggaagttcattgtgcttgtcatccccaaatcttaatggggtgacaagcctgccttgcccttaggtttaattaaagaagtaggatctttcttgggttctgtcaccctgtgttcatgtgggcacacatacctggttagtatctcctaggcttgtcccaaggaatactcttgtgggctgtgagcattgtgtcttccttagctttggactggagatgctgtctagccccatcagcctcacaaacatctattagtgatatgtgccaggtttacgtgcttttcaaaaaggtatcccttcctgcccacgtggtaaagaggggaagaagaggcggggccagggttgctggaggggaggtgctgttgcaatgattggtgattttccaggcctcatagaaggcagttaacaatgggatcatgtaaaccaaagagccttattgtttcgaaattggacgcctatttgaacaattatgatcggcagtgatctgattaacactgaaatacctattaggctactaatgtatgaatgaaagaaaaaaatacaggaatctatttaaagagaggacaggtgtgtagctctacatgttctaaatcatattaagaagaagcaaaggagggttaagagaggatcatcatgaatggaagaaggcccatcaggagagctgactacaagtcccaactctctgacctgcagctggtgacccatctccaagcaagtcaccctctctcctttagactcagtgtcttcatttgaattggagattacaataactaccacaaaggcgttaaagtaggtgataaagcaggtgaaagtttgcaagctccagggcgctatataattatgagctctgactatccctttgagaaactggttttcataatgagtgactcaattaacctgcatcatgtgctcactctggaggccagcctggggctggacaggctgctgaggttgctgggatgggcacacagattccatgtgagggggtcttaccctcggccacatcctcatcctttcttctgtgtgccactgttgagatcagagaggtttctgagagtgagggcaggaaagtgtgcccagaggaggggcagaggaagaggaaggtgtgcccagttagtgaatggaaagaacttgactccaggactgcgcggttgtagggtgagggtggcagaagaagagcagccaaaggggcaaagagggacttgcctggatgattctgtgccaggagccgctcacacacttctcaggcctgccatgcttctcacttggggtcacaaaggttctttgcttgaccaaacttcagtccgcctcctgaaccttctcccaggacctcctgtgcacttccttgtaaaacccaatcttagcaaaggcccctgataagtcattttggcatgaactcctcacccttgatatcttatcaggttcctcagcctccaccagcccccaggtgatgtctggtcactttggccagtcttcagggagagtcctattagatcggtttagccagaattccccttacccctcatggcgcctcgtagtaagtttctatccactgacccccaccctgctccttggctctaaaccccacttgcccatgctgtattccgagttgaggccaatctgtctccccatcactgcaagactccactgcagtgggtctctatacctatcatgatggtcctgaataaagtctttgctgctgtgatttaacaagcgtgattaattactcttttcttttttttcttttgagacagagtctcactctgttgcccaggatggagtgcagtggcgcgatctcagctcactgcaacctccgcctcccaggttcaagagattctcctgtctcagcctcccgagtagccaggattacaggcatgtgccaccacgctcagctaatttttgtatttttaggagagacgaggtttcaccatgttggccaggctggtcttgaactcctgacctcaagtgaaccacccacctcagcctcctaaagtgctgggattccaggcgtgagccaccaagcccggctgagtaatttttttcttggcatcttgggagatgccaagtctctttatcacagcagtagttcccctggctcagttattttgacaataatcaaaataaattctgaggctccttgagtgctttctgacacatgtggacaaacaccagactgtcctggggagaggggccctcatatgggttgtgggaccagcaggcggtcgagcacagtaaatctgcccacggctcagggaatctttatttatggttgatctctcatttcctttttactagctttattatgtggtttcctatacacaattgccgatttagcattctgttcagctactgacaagcccttctctagggccagtgaggaaattccggctgcagagttcagggaaggttgtggaccccaggcaggctgagagcagaatccagcattcctgcacttagcctcttccaggagccaaacctccctcattgcccccctgtggggtagaactgaatgagtgacaagtcccctgtgcacaagtcttgcttccttacatcctttccaagatcctgtcaacagaagataattgataacatttttgtaacagcctactaggtaccaggctgggtaccaaagctaactttgcagttctttcaaaagccctaggaggcagacatcatcttttttttttttcattattcagatgagaaaactgcagcatggacagattaagtgatgtgttccccaggttcacacacgttagtaaatggaggtgctgagagtcagactcggtggcctgacttccaagcccaggctaagtcagactgacagcgagatacccctaaacccccttctctgcaatggccccgaagaaccttggggtttggtattccttcaatcgtggtgataatgctttgattctgaatattaatgtcttgtaaactgtctagttgcagatggcttaacacaggggaaaaagaacttgggctttatctgacttgacctgctttttagtcaaatgcaaaataagttgcgagccgagactctctttaatcctcaatcacattagcctgatgacactgctacattaatttaagtggttaatggacaaagtgggtcaatccagctttagcttaaatcaaggctgactccagtgctgctgaggcagtcttccttaagggaaaagcactcttcttctaactccctgttggcagtctgcaagaaggagtgcccgccctctagggaattgccttttctggctcctgtgatcaagtttctatggtttccgtatcggtgctagataggggaattgtggtctcagtggattaagatggcttgaagcttagaatgccttactgagaggtaaatatttggtcaaaaataatgtggaaattctcttttttttttccttttaattcctgtgcctaggcaggaatcagttggaaatctctattccatagtagatagctaatagatgatatagcctctaacatggtatctagaataatagcaggcacccaataaattgtccgacttgtaaataataactttctgattgtagatctgtgatcaaagcttagtatccacttagttaacacacctccttttggtgtatacaaactagcgcttatacacatatgctgaattttggtcatatgatatgccgtaaactgtgtattgagcaacttaataatgataataataatgacagtagtagtggctgatatttgttaagtatattccatatgtcaggtgtattctaagcatgttataattattaattgtttaatcctcattaaacttccatgaatacgtattggtggctccatttttgtggatgagaaaaagacgcccagaaaagttaaataaagtattcaaagtgacataacttataagtggtagagccagaatttaaacccaggcagtctgactttagatcccaaattccttaactaatttaagaagctaatttaagctaaactgagtcagctttatgaatttcatttaatttttttcctttaaaagaatatatgtgataaataattgtgcatattttgggggtacaatatgatattttgatctacgtttacattctagaaagatttaatcaatggccgggagcagtggctcacgcctgtaatcccagcactttgggaggccaaggcgggtggatcacgaggtcaggagattgagaccatcctggccaacatggtgaaaccccatctctaccaaaaatacaaaaattagccaggtgtggtggtgggcgcctgtagtcccaggtactcagaaggttgaggcaggagaattgcttgaacccgagaggcggaggttgcagtgagccgagatcgcaccactgcactccagcctgggtgacagagcgagactctgtctcaaaaaaaaaaaaagaaaagaaaagaaagattcaatcaagcaaattaacatatccatcacctcaccaacttatcattttttgtgtgtggtaagaaactggaaaatctgtttttgaagaagatttgaaatacacaacatattattattaactgtggtcactgtgcagtgaaatagatccctacaacttatttctccagtctaactgaaacttagaaccccctgatcaacatcttgtctttcatcatcttccctttaatcccccaaccagcctctggtaaccacctttttactctttttctgtgagatcaacttttttagattctacatataaatgagataacacaggatttgtctttctgtgcctgatttatttcgcttagcataatgtcttccagttgcattcatgttattgcaaatggcagaatttccttctttttaaaggctgtataatatttcattgtgcatatatactacacttaaaaaatctattctccattgatagacacttaagttgcttccatatcttgtcaattttgaataatgctattataaaatgaataggaaaatgcagatatctctttgacataccaatttcaattcctgtgtatatctatccagaaatgggattgctggatctaacctcacttaatttctttcttttttttttttttctgagacggagtttccctcttgttgcccaggctggagtgcaatagcaccatctcaactcactgcaacctctgcctccctggttccagcaattctcctgcctcagcctcccaagtagctgggattccagacatgcaccaccacacccagttaattgttttttagcttttagtagagacggggttttgccattttgtccaggctggtttcaatctcctgacctcaggtgatccacccgcctctgcctcccaaagtgctgggattaatggcgtgagccactgtgcccagcctggtttttttattattattatcgttgttgttgttttataacttcagcttttattttagattcaggggatgcatgtgcaggaatttgttacataggtatattgcatgatgctgacgtttggggtaccgttgatcccatcacccaggtagtgagcatagtacccctctaaagtatttttggaggcttctagagttgtgtcttgggaatttcctcgtggcatgtttgtatcagtttacttacctgatttcactggattttttggctgctgtgtgctttgttgctttgtgaagtaaaggctttgtcagcagtcactgtgttaaagccggaacaactgggcgggacccgagggatgttttccttccagtgcccatggcacatctgcctgggtttggtaagtgtgagaaggcagactagtggcaggactcatggacagtgaaatctctgggagtcccgggtgctatagttttaggaaaggcacttatcagaggccaaaggcttttgtattttggcttcagatgcttggggcaatctgaaagctgggaaaataagggaaaggttatacccacaagaggatcttagagaaacagatagcttgccctttctaccttgcatgaaggggccttcgtgttttccggtagatggtacctgccctccaaaccaggtgggatgctaatctacctttcagctctaaagttctacttgcattttacatgtttctaccactgcttccagaaataagagggagctgggattagaagtcgtgaccttaagacgtgtggccagagaggcgtcaccttctgatcccggtttgtttgcttgcgtttctcagggacctgatgcccagaaccctggacgggcagatcaccatggagaagacgcccagttacttcgtcacgcgggaggcccctgcgcgcatctcggccatgtccaaggacaccaagctcatcgtggtggtgcgggacccggtgaccagggccatctcggactacacgcagacgctgtccaagcggcccgacatccccaccttcgagagcttgacgttcaaaaacaggacagcgggcctcatcgacacgtcgtggagcgccatccagatcggcatctacgccaagcacctggagcactggctgcgccacttccccatccgccagatgctcttcgtgagcggcgagcggctcatcagcgacccggccggggagctgggccgcgtgcaagacttcctgggcctcaagaggatcatcacggacaagcacttctacttcaacaagaccaagggcttcccctgcctgaagaaggcggagggcagcagccggccccattgcctgggcaagaccaagggcaggacccatcctgagatcgaccgcgaggtggtgcgcaggctgcgcgagttctaccggcctttcaacctcaagttctaccagatgaccgggcacgactttggctgggattgagcagacccgggctatgtaccttacccacgtggcttatctattgacagagattatatgtatgtaaaatgtacagaaatctattttataataatttatttttaattcataagcaattaattcactaagctgcctagccacactctttagagagttagcttcataatctgttaacattccaaagtgtttaactctagtatttcgttctcttcttcacaattgatggtgcttctattttttcttctcccctacctgttatatttaaaacaaagaaaagcacaacttgagatttttgttgttacgggtattcagccttcagtcaccgtctgagttctccagttgctgcctccttgtcttgtcttgggtctcccattccagcttccctgtctcttcctgcctgtgtacctcgtaggaacgctgagctgcctcaacagggctgtattctgaagggcaggcctcatgcagcagcctccttgcagatgtggtgtcccgtccaatgatgtagcctgaaagccacagccctagggttctgtccctccctccattcagcacatggggaaatttctcactccctttacagggacatccacatcctttttttttcttttttttttttttttttttttgagatggagtcttgctcttgttgcccaggctggggcgtaatggtgtgatatatgcttaccacaacctctggctcccggttcaagcgattctcctgtctcagcctcccaagtatctgggattacaggcatgcaccaccatgcctggctaattttgtatttttagtagagacggggtttcttcatgttggtcaggctggtatcaaactcccgacctcaggtgatccgcctgccttggcctccaaagtgttgggattataggcgtgagccactgcgcccgctatccacatccttctagagtcagaatggtagggtctgttgacttcagcttttgattttgcaggatggccctgtgtcctcctctgccccattccctggttcattaaccagtttgaagtgtatgtagattgttgccccgtctttcccaggtcacatgtgtgagatgcctgggtgctgcttcagaaatcaagatgatctcctttaatttgcatgaaactacaccatgctgcgttccccaggcagacagttctgctttgacacaccaaagaatcccgtaggctagcagagccaccagcacaaaccaagggcgctgggtgtcgagactcagaggggtcagctgtgtccctcggcatcagcgtctaccaaggtgctgctaggtacagagccagccagtgttgggcagcaggctcacagcctcaatagggagaaaagacaaaggcctcaaaatgacaggcagcctgacagaggaaggagtctgacacctcagcttgatgcgtctttggaattcctagctcatctcagaattatatcttagagtgataatatgggtggtagccagtggccaaacagcaagaactaagagtggcccttgcaaaaaaaggttgggaaagctgggcccatattgcctgtaaacccttgagcctgatgctcatacagctgtcccttgttttagccaggtcttgacagaagggttaccagcactgtcactgctctacagaatgctctccccgtgcctctctgttgatttataacagttgggtaaccagatagcaatatagtggcaattgagtagccatatagtaatacaggggcagttggttaaacatatagcaatatcacataatgatatgtttaatttaacctcagttttttaaaccagaatgcttctaccataaaagaattgtgatttcagttatacttccatcaaggaatatgtgggaagatatacatattgtcaaaatggttgggatgggatagttacaaaggacacttttgtatgttgtatgggatcacttgcctgatagtataaggaacattgtatgaaaagatgaaaagatacttcatttttagaaactgatcagagatgtcactggtctttaagtgatgtcttgaaaatccagtatgtatttgcccaaaagttttagcctacatctagctagcttacacttagcagccaaaccatcattgtgtaggttctgttttggaggaagctcatgggggatctgtgtatttcttaggtttctccctgttctccaatgttttatccatttcgtagcttttttactgtctccagaaagtagtgtgggacctgcacttaggggaataccagaatcatagcgtggttctgccttcttgatgagtgattgtgaaaaacacctgcataagggtgctaattggttgtgtattttttcatttatttgaaatcaaactgagaacacctcttttcggtttacagcataacatggcttgaagtaaaaggcagtatccaagtccttcacctggtcttgccctgtctactttctgatcattctgatggtctgatgtggctgttgatgtggaactgcagaagagttcagagaagagtatgcaacaaagccataggaaaacacacaggagcttttccctccccttcaggtccccgccctctttccaagctggacaattttttattaagttgtttattccctgccttaaaactgaaacaggaaattttctggtagaaggagggtcatttagtcacgaacactgaagtgggtcaaaattctattctgggtcaaatccttgaattcaaacagatgtccataatcagtactgatggaatagagcaagtttttctatgtaagacaaataaatcaaacatcatgtgcatctcctcataagggtctgcaagggtctgatggtttaaagttcctaacagatctggttgcagcatctgccggagcttgcaccccatcatcggacggtcatcttcctgctgcagaagttaggtaacataagacttagatttcttcctgttctagcaatctgcaagaccaccaggcttaactttttagctgccagaagacaaacccccttttctgtttcggcaatttgtcctggcacgtgttttggacttcctccgatttacacgaaaagctctgatattcattggagtactttattttttttcctcagttttgtttcttttctcatgtaaaaacaaacaaaaaggtcaacaaaaaaaaattgaggtttttcttgtttctatctagttcatgctttctttgcggtgtttgaacagtagtctgttaacttagtaggtggtacctggaaaggtattttaagtatagtgactgtttaataaatacttaattggatgatggaggaggagaaattgttttcttcccaggattctctttgggggtcattttgtgtgacagatatattttagacatttggagaaacagtttcagatcctgccaggatatttttgtaaaaaaggaaaatggaagattccaataaactagaaacagtacgtatctaagatgctgacacagaagctaatgtgacttttcagcttatcaagaggatggccaataaaacttaaaggtgtggttagatgttttctcacttttgtgacattaatttatcactgagtctcattcaaccaagtaatctaaaatactgtgcaaattctagcagtatgtcttcgataacttggatgttaggatagccaatatgtacaaaaaattaaatcaagtattttgtcctatgtataacacaaattaattttacacagagaaagatgtttctaggcaagtgaaattctggtaattcatactatttctttgtatgaacaaataaaatatattttgccaa

SEQ ID NO: 104 - DNA, 6237 bp, Homo sapiens
gggacaaacgcagccagacgccggacttgttgggtggcgttagaaagtaactctgtttttagtcttcttgaacaaaattacgtctaggtttgaaaaccaaacttttatgctttctataactttaggaactctaaaataagggacacacaaggcaaagcactaggagtcgctgttgggtattcccagcggggcttagtctacctcctcttcctgcggtgccctagtgagccactccgccacctctgaccctgttgcccccaaaactcgctggcatttcctattatttccagatatgggagagaaaaaaaaggaagcgggagccggactcctgacacagtccaagtggctgcatcttctacaggcatccatctgaaactcccatccgtgattgttccctccccagagaccccggtaacattcccgggtaacaagatgcccctggttatcaaattcccctagctcttgaggctggctggacgttatccctcagagggggatgagcatggcaaattgggacttgttattctgaaggattcgtgggtcctgtgaactctaattactttgaaatgggtctaggttgtgagatgtctcagagcactttagctcagctgttattactgtttctaaaggccacataaagggactctgatgggagacattcctcatggaggattcaattctataacatttctctcaataaaggctggtaaatagaccttcattaaaggaaccaagaatttaaatttctaggactcagaggggtggggtcctatacccagtcagagatcctacctagagcctagaccaagagaaaaacacagatggtctctcaaactgatttgatctgacttcgcaggtcattagatatagaatctccgaaaaaggtggatgctgagagacatagacagttcctacactttaagaaatctccatcttgaggtctcaaattgagaaagacttaacagacccatgagagttacagatccctaataacctgggctaaataatccatgtctgccgggcgcagtggctcacgcctgtaatcccagcactttgggaggccgaggtgggcggatcacctgaggtcgggagttcgagaccaacctgaccaatatggagaaaccccgtctccactaaaaatacaaaattagccgggcctggtgacgggagcctgtaatcccagctacttgggaggctgaggcaggagaatcatttgaacctgggaggcggaggttgcagtgagccgagatggcaccattgcactccagcctggtcagtaagagcgaaactccgtctcaaaaaaaagaaaaaaaaaaagaaaagaaaaaaggatactgtgaggagacacaagagcatccatgacatagattatttagctcagctgtaattactgtttctaatacagtaatattagatggtgatctgcctgcctcggcctcccaaagttctgggattacaggtgtgagccaccgcgcccagcctttttttttttttttttttgagacaggatctcactctgttgcccatgcttaagcgcattggccctctcactcactgtagcctcaacctcctgggctcaagcgatcctcccacttcagcctcccaactagctgtaactacaggcactggccaccaaacccagataattttttttttcctgtagaggtggggttttgccacgttacccaggctggtcttgaactcttaagctcaagcgatcctcctgcctcggccccccaaagttctgggattacaggcatgagccaccatacctggcgtacagtatccagtgtaatgcagtgattaaaaattcaggatccagaccgggatggtggcttgtgcctgtagtcccaggggtggaggttgcagtgaacggaaatggtgccactgcattccagcctgggtgacagagtgagaccctgtctcaacaaaaccccccaaaaaccaagaacaaaaaagaatgcaggatctgatgctagattgtctgcattagaactctagccacttaagctgggtgtggtggctcatgcctgtaatcccagcacttttggaggccgcaggcgggtggatcacctgagattgggagttcaagaccagcctgaccaacatggagaaaccctgtttctactaaaaatacaaaattagccaccgggcatggtggtgcatgcctgtaatcccagctacttgggaggctgaggcaggagaatcacttgaacccgggaggcagaggttacggtgagatgagatggcaccattgcactccagcctgggcaacaagagcgaaactccatctcaaaaaaaaaaaaaaaaaaaaaggaattctagccacttagaagctctgtgatcttgggcaaattgcttatctttgcacctcagcctcctcctctgtaatatagggtaatagtatctaccttaaagggttgttgtgaaaattaaatagtttagtacatgtaaagtgcttagacaaagtatttggcattaagcgagagttggatatattagccatcattattaaccacctgggggaacttcaactgatttggagtctaggcatacaactggaaagacctgcctaggagtgtcttgtgaatgcgatttgcataacggtttaggcccagctgacgtcaagggctccttatagctccaggtcagttgtagccctggatgtagttcctgccacgcaacagtcccacaatctccccaccaacccttcttcctacccaactcctgcagcaccaggaagtgaaacaaagaggcagagccctgtgcctccaactcacccttgtccctctcatcccatcccccaggctctacttcctcctccttttcatctttctttcatctcttatcttttagggctcccagaatggggaccagagatgggaagaacataggagacgttgtacacaagtaaggtgaactccctatcctgccccctcccctttccttattccattggtgtccaccttattagggagagaggcaaaacagttctcacccaaactcagataattctctgatgctggaaatgtttaatctaaagggtagatttccatttttttttttttttttttgagacagagtcttgctctgtcacccaggctggagtgcagtggcgccatctcggctcactgcaacctctgcctcctggcttcaagcgattctcttgcctcagcctcccgagtagctgggactataggcgcccaccaccgtgctggctcatttttgtatttttagtagagacaggatttcaccatgatggccaggctggtctcgaactcctgacctcatgatccgcctgcctcggcctcccaaagtactgggattacaggcgtgagccactgtacccggcccttggtagatttaacttagaatcgtaatatttttttttcttctcttagctcatacctacagaatcataatatttgaaccagaagtgtcattgggcagttttgaatagctctaagggaagggagacctccattcaggacaagtttctcagaagaaaagggtcaacctcttgggggaggctttgggagccagctgtgtggtcaccgatggcctcattctgacgtcttcgaaattgttctgggaccctccactggggtcggggcagtcccggctttggaccaccttccactcccacgcccaacctcacactcttagctgtttcactcgatgttgcatcatggagggtgatgaaatcggtgtcagtggattttacccatggatgcaacaagctgaaggaccagccagagtcattgacagtgcaccttcgactacccagaactcctgggcttcctagccatggggtccaaagctgggactgccccgaccccagtggagggtcccagaacaatttggatgacgtcagaatgaggccatgggactaggtgctggaatgtctaagttgaacttccaggccttatttgcactagtcctgaaaaaaacatcatccaactcttatagagcctatgaaatcttgggccactagggttgaggagtcaggtggttcttagtcaataaccctcttcccacaagagcctttctaacctccactgtgaggcctgaaatggggagcaataagacctcatactggcttcccagttctccaagttccttcatgcgcattctctcccatgaaaccaggaccatccagttgaaataatgttgtttccaactgagaaaaagaagcccgtttattcctaatagggggcatcaggtaggaatcaaacttcattgcaaacagctcaccatcctattgggagatgaatggatgtttctctgttttgctttttcctcaagcaggaggaagtgaggaaattaggtttggggtggggtaggggtatagctttgagaggcaaaaagatcagggaaagatcaaacaggaaggaacttgagaccagattaatttaaatatttgttctcccttacccctcccaccccatccccgctgtgccccccatccccgccccttctatagctatttcgattcctggagagcattacacatgtgtcccatcccaggcctctagccacagcaaccacactactcatttcccctggaactgaggctgcatacctgggctccccacagagggggatgatgcagggaggggaatcccacctgctgtgagtcacctgctggtataaagggcgggccttacaatgcagggaccttaaaagactcagagacaaagggagaaaaacaacaggaagcagcttacaaactcggtgaacaactgagggaaccaaaccagagacgcgctgaacagagagaatcaggctcaaagcaagtggaagtgggcagagattccaccaggactggtgcaaggcgcagagccagccagatttgagaagaaggcaaaaagatgctggggagcagagctgtaatgctgctgttgctgctgccctggacagctcagggcagagctgtgcctgggggcagcagccctgcctggactcagtgccagcagctttcacagaagctctgcacactggcctggagtgcacatccactagtgggacacatggtgagtggcagcccctggagcctaacaggagtccaggctctccaaggctgtggcagaagaccgtgaccttgagtggaagctggagggttgaaggccattagggagtaagagaggacaagagagtagggttcctgggagagtcatgggcctgagggtccaggttggcttcagaagtactatcttacttcttcattctttccacctcttccttcattccaggatctaagagaagagggagatgaagagactacaaatgatgttccccatatccagtgtggagatggctgtgacccccaaggactcagggacaacagtcaggtaccactgggatgtggctgggcaatgaaggagaggggactgagaacatggctgggtaccatggtaaaccagaagttgtgtctgaaaatagtaagaaactgggtgagtcttcagtgaatggagtaggaagagggtgtcctctttcattgctttcttttctccctagttctgcttgcaaaggatccaccagggtctgattttttatgagaagctgctaggatcggatattttcacaggggagccttctctgctccctgatagccctgtgggccagcttcatgcctccctactgggcctcagccaactcctgcaggtatgaagtaggggcgtggaggatgggggcttgcaggtgtcagagacagagggttgggggttaagggtttagagtcttctctgactgtgtcctatgtcctttcagcctgagggtcaccactgggagactcagcagattccaagcctcagtcccagccagccatggcagcgtctccttctccgcttcaaaatccttcgcagcctccaggcctttgtggctgtagccgcccgggtctttgcccatggagcagcaaccctgagtccctaaaggcagcagctcaaggatggcactcagatctccatggcccagcaaggccaagataaatctaccaccccaggcacctgtgagccaacaggttaattagtccattaattttagtgggacctgcatatgttgaaaattaccaatactgactgacatgtgatgctgacctatgataaggttgagtatttattagatgggaagggaaatttggggattatttatcctcctggggacagtttggggaggattatttattgtatttatattgaattatgtacttttttcaataaagtcttatttttgtggcta

SEQ ID NO: 105 - DNA, 76856 bp, Homo sapiens
ctctgtgcctgctgccatccacgtaagatgtgacttgctcctccttgccttccgtcatgattgtgaggcgctcccagccatgtggaactgtaagtccattaagcctctttttcttcccagtctcaggtgtgtctttatcagcagtgtgaaaatggactaatattgtaaattggtaccagtagagtggggtgctgctgaaaagatacccgaaaatgtggaagtgactttggaactgggtaacaggcagaggttggaacagtttggagggcttagaagaagacaggaaaatgtgggaaagtttggaactccctggagacttgttgaatggctttgaccaaaatgctgataatgataaggacaatgaaatccagacttaggtggtctcagatggagatgaggaacttgttgggaactgaagcagaggtgactcttgttatgttttagcaaagagactggcggcatttttcccctgccctagagatttgtggaactttgaacttgagagagatgatttagggtatttggcggaagaaatttctaagcagcaaagcattcaagaggtgatttgggtgctgttaaaggcattcagttttaaaaggaaaacagaacaaaagcttggaatatttgcagcctgacaatgcaatagaaaataaaatcccattttttgaggagaaattcaagctggctgcagaaatttgcataagtaatgagaagccaaatgttaatcaccaagataatggggaaaatgtctccaaggcatgtcagaggtcttcacggcagcccctcccatcacccagaggtttaggaggagaaaatggttttgtgggctgggaccagggtccctctgctgtgtgcagtctaggtacttagtgccctgtgtcccagccactccagctatgactaaaaggggtcaaggtacagctcgtgctgtggcttcagaggttggaggtcccaaggcttggcagcttccatgtggtgttgagcctgcaggtgcacagaagtcaagaattgaggtttgggaatctccacctagatttcagaggatgtatggaaatgcctggatgcccaggcagaagtttgctgcaggggtgaggccctcatggagaacctctgctagggcagtgtagaagggaaatgtggggttggagcctccataacaagtccctaatggggcactgcctagtggacctgtgagaagagagccactgtcctccagaccccagaatggtagacccaccaacagcttgcactgtgagtctggaaaagtcccagacactcaatgccagcccatgaaagcagccaggaggggtactctaccctgcaaaggtgcagaggtgtctgatgcactgcttgcatcagagtcacctggatgtgagacatggagtcaaaggagatcattttggagccttaagatttgactgccctgctggattttggacttgcatggggcctgtagcccctttgttttttggccaatttctcccatttggaatggctgtatttacccaatgcctgtacccccactgtatctgggaagtaactaacttgcttttgattttacaggctcataggcagaagggacttgcgttgtcttggatgagactttggactgtggacttctgagttaatgccgaaatgagttgagactttgggggacttttgggaggggatgattggttttaaaatgtaaggaaatgagatttgaaagggaccaggggtcaaatgatatggtttggcagtgtccccacccaaatctcatcttgaattcccatatggtgtgggagggacccagtgggaggttattgaatcatgggggcaggtctttcccatgctgttctcgtgatagtgaataagtctcatgagagctgatggttctataagggggagtttccccgcacaagctctctctttgtctgctgccatccacataagatgtgacttggtcctccttgccttctgccatgattgtgaggcctccccagccatgtggaactgtaagtccattaaacctctttttctttccattctcaggtatgtctttatcagcagtgttcaaacagactaatacaccccatcagaggaatgatgagcagaccctggccctactaaaattagaggagtatttttggtaataggagggctatcccaggtcctttttctctttggaagcacagttttctctgagattggtattccctatgggctgacttgcttcctgaatctcaagtactgaccagcatagtctacatcagagcaggcatcagtgccacttgttaaagcacagattgctgggattgctgggctccacctcaagagttcctatgtgggtctgagattgtccatttctgacagttctcagttgaggagactcctgctggcctagaggcctcactttgagagcccctggaataaatggatgtagttttctggatcagtcaattccttagtgatctgggtcccttctctctgcatgatgaatgaccacaatgtgtctgatgaacctagttgggcaatttaaacttatccaactgagagaaaacaatactcttgcttgaaaagatgctttggaaatatcaggtagagaaaaatataagaaccattaaccagcatttattaggtttatatactacatgactacttgtagtcatagcttgggccatatcaccagtttcctttagtttcaattagagccaatcatttaggatatattttaatagctagttgcatcagtcagtcaactgatactgtatatacaatatactgaagaatatacatacagactactatatgaggggccatgaaagaaccatgaagagagaagacatggctcctatcctagatatctgtaatctgaatttaacaatacctaccatttattaaatatctgccatgtgccagacactgagatcctaataatggctatgattttttgaatgcttatatgttaggctgtaagtactttacacatattagctcctttcatcctcacactaaccccatgagattggtaactatgactcacacctattttacaaatggaaaaaccaaagaacaggtcagttaagtggtctcacagctggtaggtggtcaattcagacaccagagcctgccttgctaatgaccacactatactccttgtctgctctcggacataaagtgcttaatgcatcaacccatttaatccttatcacaattctgtgagattcatattacgactgcccccattttatggataaggacataaggcattcagtggttaagtagcctgcctaaagaagcacaactattaagtggtgatgccaagattcaaatccaagaatgtctgacaccaaagttgcagagctttctgggaagaggaggcagactttccatctgatcctcaaaggactctacattttaaaagcatgaggaccattgatgcaaaagtgaaatgctcaaggtataagagctctctggtttttgagttagacctcactccgttgatgctctgttgtctctgctagctagttgactgggatagatgaacaaaacctgtccatggcaaccttcacctgaattgagcatgagagccctggagagtatatagatgtaagatttcttagtacctagacttggctgttgacatggatctgcttgactccaaaacctattttcctttcttgtgcattttactggttcttaggtaaacagtgttagaattatgaaacaattgactctactcataaatggaaatgattacattttaaaagcttagaggccacagccattttgttttgggaggttatggacattttcaaagactacagctggattaagtgccttctggcttatgcaatcaagttctagagggagtttcaaccaatattttgccacacttgcttggagttcagctgcatttctctggaagtgatttaacttcagaagcatttcttttctctataacgtaactttctgatagttagcttgaatgtttggtggtgagcagggttgattctgtggttgagttactttataatgccaatgggagaggttctattctgcctggaaatagacagaacagatgccagtaattttaatgtcagcttgagccatcacgtgctcataacttgggctcatatatttcagtcagcctgaaaataaaggcagtagaggcaaatagaaaagcactgggctctgcacctgagcagacctgggttcaagtttggctctgtcacttaataatttgtgactttgggccaattctgaatctgaagcctcagttttctcatcctaaaaatcagacttaaattagtacctacttcatagggttattacaaagattctattgagatattgaagtactttagtccgtttatgatgccaatttataatatagtcatttataggacttgtttttcccagaagtagagtttctatagacattggtttaagctgaggttatgtaccgggcagcctcccagccctcactgtcagaccttctccaccctgatggattttatccaggatgtgagcagggtgtggggcaggagaatgtatgctaacaggatggacacaaggaatacgagagctgtccaaagagctacctctataatctttgctgggattctcttgcctgtgtcctcaccccagttaatgctgtgcattgctggatcctatagcttcctccccagcccacagtatcctatgtttgcacagcatttgcttcattaatctatgtttgcacagcatttgcttcattaaaagagctgtagtcaaaacactgctcaaagaaatcagagatgacacaaacaaatgaaaaaacattccatgctcatagattggaagaatcaatatcattaaaatggccatactgcccaaagcaatttacagattaaatgctattcctactcaactaccattgatattcttcacagaactagagaaaactatttaaaaattcacatggaactaaaaaagagcccaaatagccaagaaaaaagaacaaagctggaggcatcatgctagctgacttcaaactatactacagggctacagtaaccaaaagagcatggtactggtgcagaaacagacacatagaacaatggaacagaatagagaactcggaaattagattgcacacctacaactacctgatctttaacaaacctgacaaaagcaagcagtggggaaagaattccctagtaaaataaatggttctgggataactggctagctatatgcagaagattgaaactggaccctttccttatactatgtacaaaaattaattcaagatggatgaaagacttaaatgtaaaaccctagtggctcatgcctgtaatcccagcactttgggaggccaaggcaggtgaatcacttgaggccaggagtttgagaccagcctgggaaatatggcaaaacctcatctctatgaagaaagacaaaaattagccacgtgtggtggtacatgcctgtagtcccagctactcaggaggctgaggcatgataattgcttaaacccaggaggtggaggttgcagtgagctgagatcacaccactgcacttcagcctgggtgacaaagcgagattccatctcaaaaaaaaaaaaaaaaaaaaagtaaaacccgaaattataaaaatcctggaagacaacataggcaataccattcaggatataggcacaggcaaagatttcatgacgaagacaccaaaagcaatcaaaaccagagcaaaaattgacaaatgggatcttattaaactaaagagtttctgcacagcaaaagaaactatcaacagagtaacacaacctacagaatgggagaaaaattttgcaaactatgcatccggtgaaagtcttatatccagcatttctaaggaatttaaagaaaaacaaccccataaaaaggacatgaacagacacttttcaaaagaagacatacgtgtggccaacaaacatatgaaaaaaagctcaacatcactgattattagagaaatgcaaatcaaaaccacaatgagacaccatctcacaccagtcagaatggccattattaaaaggtcaaaaaacaacagattctggcgaggttgcagagaaaaaggaacgcttatacactgttgatgggagtgtaaattagttcagccattgtggaaacctaaaatatctaaagacagaaatagcatttgacctagcaatttaaatcctgggtatatacccaaaggaatataactgattttattataaggacacatgcacatatacgttcactgcagcactattcacaacagcaaagacatggaatcaacctaaaggcccatcagtgatagactggataaagaaaatgtggtacatacaatatactccatggaatactatgtggacataaaaaagaataagatcacatcctttgcagggacatggatggagctggagaccattatccttagcaaagtaacacaggaacagaaaactaagtaccgcatgttctcacttttaagtgagagctaaatgttgttctcatagacacacagaggggaacaacacaccctggggcctttcagagggtggagcttgggaggagggagaggatcaggaaaaataactaatgagtactgggcttaatacctgggtgatcaaataatctgtacaacaaactcccatgacacaagtttacctacataacaaacctgcccttgtacaccttaacttaaaataaaagttaaaaaaaagatctgtactcatcagttataacaataatagtaatttctggttattaagtacctgtgaggtgccagacatgctatctcaaagtgtaaaaaatatcccttttaagtactattcttatccttgccttatggatgagaaaataaaaggttcagagaagttagttatttgcttaagatcttgtggccagttgacagcagagccaagatttgtaatcatatctctttgtctctacactcttgctctttgaagtgtatcagactactttccagaaataaactaagagaaaagtgtggctggaaaggtaagctaggccccgatagtatggacttttgggtggcaggattttggtggcaagaattttataacttgaaactgggccttccaggttgggaaatcattacactcaagggggagctagagcaatgccagaggatgaaatcagctcaagagaatgagagaggaaaagaatgtcagaggatgctcccattaagggaattaaaagaactagtgaaggaagtgtgggaagcagataggaggaaagtcaaggggaaaaaaaaatatatttcaggatggtggttaagaatatcaaaggctccagagaaattaaaggggaggaagacttggcaaaggtcactggattaaataacatcactggtgcttcccaagaggcccatgttaatagaatggtgagctcagaagtgttgggagacaatagctttaaggagtgagtggaaaaattatcgaggatattttagcatgaagtgtggtgacatttggtaagaacagcaaattaaaaagggtagccagactccagcagggcttttagatggaagcatgttgctggcaaaagggacagggccagagaatgtaatcaaatttcagtatattcagcaactactttggctggaaaggaaaacggagagatgaattgtctggaagtgaaaaaggagagaagctggcaagagatgagggtaaattgagaagtaaaacacagccatcagctttggaaagctgggccagtcttgctttctttcccctgcgatgttccttacatcagccaggagctgcaggagttcgactcatgggggctgtccaggctttggctgcatctcacacccctggcctgccttgactcttcctcgcccccattctcagactcctccatctttttttctttttttgagatgagtctcactctgttgcctaggctggagtgcagtggcatgatcttagctcactgcagcctcaaattcccaggctcaagtaatcctcccacctcagcctcccgagtagctctgagtatagagatgcaccaccatgcctggcgaattgtgtgtgtgtgtgtgtgtgtgtgtgtgtgtgtgtgtgtgtgtgtttgtagagatggggtttccccatgttgcccaggctggtcttgaactcctgggctcaagcgatctgtccagcttggtttcctcaaatgctgagattacaggtgtgagcaaccatgcccctcagactcctccatcttttaacctctctgtctgcctaacctccaggcaggtgaggagccaggaggcctgggctgaatgggacccatcctgttcttgaaggggagactctgccccctccctgctcccacagtagcacataccacagcttctctcccttacccaagcaagcttacagaatgctgttttccagagtcatacctggcaggggatgtaggggcaagggaaggagaagcaaaggaaaagaaacagagaagggaatttagagtttccaggctcctctgagaaggttcaatttctgctgtactaaaagaagaaaaaacaacctcactcagattgtaaaatttgtaatgcaatatagaaaatcctgcttagtttaggcaacactacagtactcgttagaggattgaatggcttcaaatctttggctaaacaaaataacaggaaaataaacagtcttatacttgaatgcagtctacttcttctcctgaacagctgagaaaattgaactgcaaaaagctagatggcttctcagagtcacagagcagttggcatgggagccaggacatctccatcttcctgattgttcggcgttaaggtgcctctctggtccactggcttcctttgcccacagatcagaaggaaactcatggctcatcaaaagcttttacttccaactgcactgtcctacctctctggggacccaagccgggcctcgtcagccagtctgtcggcagctccctattgtcctctctcaagggtatcagtttctaatctcccacaggagcctcttcttctcaatccaaacactcaggagaattttagcggctcagcaagtgaagagagatggaagcagagagtttaaaccctgaagggcacattcatttggataaataagaaccctagagtctctgacttttgaattggccaaggggaaaaaagaataaggctagggcagactggcttctatccttcattcctttttcatcctcgcctccaaatattcttttgattttgctctggtggagtgtttgttttcaggacttttctttgtttctttcttatgtgtgtcctttccttttagattttataggtacatgtaatatttatgtgtcagtgaccttccaaagcagttttagagattttctgtttacatttaggaattttctttaaggtctacagagtcctttgtgctttttccaggaaaggcactcagtaagaaccaaaacaaacaattgaataactcaaatttgatcggagccaagtcccttagaagtgtaagaaaaaaaaaagttagcatttgtttttgttgtttcctttcccctccccaacccattcaaatatttaagccatttctacttctctggttcaggagtttaaggctaagctctaagcctcatagtggacaaatcttgacactgggagatttagcaaggcacacctcagaaatgatccagaaactatgaaaacaatgtttacttcacccagtctctgggaaaactcatgccagtatatttcacatttgtctctgaccatgaaggatggggaactattattgctctagccaaattgtacatgtccctggcagggctagggctacatcattcagagactgccatgcaggccccttaaatatttgtcagaagccaggagaatgcctgtggttactctgaagcacaaactgaccaaatgggatcacactcagttgcttgcctaaccctccctcctccttcccaacttgatctgttctgtgaaaaagttatcacggattctgcaagagcaagggccagctctatttagaaaaggtgaaagatcctgtattcacattttattgcttctaataactagctcttggaccttggggaagttacttagtctgtttgtgtctcaattaccctggttgtacaatagtaataataatacctgccttatataatagctgtgaggattaagtgtgataatggatgtaaaagctcctggtattgttcttgacagtttgtattcatcgatatatatattagccttttttctatttatgccacaaagctctctggaatttctgttggagatcatgtgatataaaacaaacctccactaaaaatgtaattcaattgcagattaaggctaacccacaaaattgataatttctaaaaatggaaatgattcttccatggttcctgccctggcaatgaggagtacatctttccaggatggtggctactgcaccaaactgccgtctgctgtaaccaaaatgatctaggtctctcccccgcccagagttctggtgtttctaagacttctcaacatttaccaacagaaatgaaagggaaagagtctcatggaacaatgactcttacactagaagcttgaagtcatgagctaggtaaaagtatctgccaggtcaactaggtgaatgtgtagcaatattaacccccatccatttgctttcactacttttatagtagcactaagtagtaaggattaaatgtgatattatataaaatgctataatatatgtaaatcagctagctagaagctgggatgtcaaaagagttgaatccctaccctgcccatcctccaggctactgtgtgaactctatggtcttcaggatttgtagggttttttttttgttgtttgcttgtttttaatgataaaaattcacactcagcaagagatcagtggttttgctgaatacagaatatatacactgaatttttagcatttaaggaattccaaatcctattaataaatatgactttataatagcaaaaatcttttcaagattttttagataaaaaaaatttaaacagtaaagcagaaaaaaaaatgagggctctgtgtcagcccaattacgctactccatttattagataagaggattagttaatttgagtgtgaagacttttttttcctaaaattttattaaaagtgatgcttctcctctttatgaggatcaaaagaataatacagttactagtccacagggaagataaatatttgttgaatgaatgaatgttcttatggaattggaataattagaaaaaaaaacaggctgttagatgcaagagtcttaaattatttaaatgaaatctttttgctgagaggcctgggattgtggtgctggctttcctgaaagaaagactctgttgtattttagttccaagatgcagtgcaggggctccatttaaggtaagggccagtgaccctgggttccttgccaggacctcgagcaactcaaacgttgaaagatgtggatgaaaagcaaaagggaaggggttgatttagctcaaagtggggaaggctaaggttggttatcataaaacagcattcgaagactattggaaggacaacacttccttaaaatatacttaagccaaagaaaaagggatgtaagttaggcatacaaaggattttttttaaatcgtggtaaaaaaacacaacaaaatttactatcttaatcatttttaagtatatagtacagtggttttaactatttgcatattatgcaacgaaaaggttcttgacagtgaagtttgtgaacaatgatggatcttgttctctcttgcaatttggatggaaaagtatgaaatttcctctttgaaattttgaaaaattgctcacgttctgagtcctgacgggctggtcaggatgatttcttagggatcacttctagcccaatgactctatggcaaggcagtgatatggctggctcaacactgaagtagacatactgatgaaagtgtcttggtttagatagaggtaggtagttcgtctttgcatttggttaaaatgaaccttagcacttataaaactctgattccatatcattcgatttccaagcttgggagggttataacatggtgctttaacttgaagcccacggaacaaatgtagctctgtactgctaacattaccttgggtttatatgcattcagcattgacatctctacattttgacctctgacgtgttttggttgcctctggactggtgccgacgatgacttctggttattccgacagacgcaaatgaagaagaagagtaaagcaatggccaggggaatggccacacttggcactagtatgtacaggatttccattttattcttctccttggaatcctttgaatctgggtgcagaaatgaaaaagagcaaaagttatactctttaaagtaacatgcataatattacattgcatagtttaaaatgaaccacctcttctattcttttatacacacaaatccactgtgagaagaaaggaatccactgcttattaccatttgtttccatcaaaccttcaacataatttattgaagtttaaaagtttaaagttcaaatgtttaaaaactgcagagggacattatgaagactttgtacgtgtgtgggtcctcctctgatgttgcctctctttagtggcagacctacatttctctaacaccttaaaagttaaacgccacgtgaatggactgtatacatccaagagccttaatgtggaccacagggctcttcttccattggctgccagcccagatcagcccccacaagatggtgttctagaaatcatgaccttgtcttggctggtttggacttatggggccaagcctgcatcttccagaatcaacattactaaggaatcctggtcccagtgtccaaaaagccactggcctgagaatatgggggcctgaagtcagggtcagtttgatctttgatcagctgtgtgaccttgaacaaatattcacgtctctgggcctcattttttacctctgcaaaagtgaagtgtctgttttggatggtgtctataattccttccagcatggcagcactgtataatctgacactttattgaaaccccagaattcttaaatggtttcatatgagcccaataattatgagtgctaacactttgaagtatatttttgaaatcttatatcccattgcttggaaaagaatataatatgtgtagaacacgagacatacttgtctttttatcagtttgagcctaaccattgaaaccaaatacttaggcatatattgtcattaatgaattatttgactggtaaaacaaacacagaattatgggatagtaattagaggggttacataatgacatgccctgataacgaagatcagctatctttaagaaaactcaaagtgtgaaaactcaaattgacacaaaattcagagatgattatttaccttacaaaagaattaaccatgcattcattcaattacccttccactcattcagtaagtcaataaacaaaagctactgcatgtcaggcactattgtaggtactgggaatacaaaattaggtatgacatgtcctctgcccttaaggagctcatcgtctggtaaggaaaatagaagaaagataatgacatgtcctgtaaatgctaaactggaagtataaagatagtgatgaaaagacccaaaaggtcctttaaatgatgagttaccctagtacatgtaaatgagaataaaccatatgtagtttttacttgtacacaccttgtttgggaactgtttggcaggtgagatatggcatatcagttattcaaaaggaataccaaaacctggttttgggactgtgccctgtgagttagccctcagaagagcctggagaggggttaaatctggttacagagtagaataaaaataatacgaattttaggctgggtgcagtgggtcatgtctgtaatcccagcactttgggaggctgaggcaggcaggttgcttgagcctaggaatttgagaccagcctaggcaacatggcgaaaccccatctctacaaaaaattaaaaaaattagccaggcatggtggtgcatgtctgtagtcctggctacttgagaggctgaggcggaaggattacctgagcccagaaggttgaggctgcagtgagctgtgattgcgccactgcactccagcctgggtgacagagtgagaccttgtctcaaaaaaacaaaacaaaacgcaattttaatatttatcaaatattttctactggtgcaaaatcatgttagctattattactatggaccaggtgcttttcataaactcattttatgtcacaaccaactctataaggtagatgacatccttatcctaatttttataggtgaagatgctggaagacagagtggttaagtaagttgcccaaggacatgctgctagtaagtcaaaagctgggattccatcgtcggtcttgctttttgcccaccattctagctactacacttcactgccaataattggagaattttgcccctattttctcatagtagggttcctcttgtttcatggaggtaggaaggatgagggtgatctgaaaggaagggaataacactgaagttttgccaaatgtgatgcttttgaaatccctgctttttttttttttttttttttgagacggagtctcgctctgtcaccaggctggagtgcaatggtgcgatctcggctcactgcaacgtccgcctcccgggttcaagcgattcacctgcctcagccccctgagtagctgggactacaggcacgtgccaccacgcccagctaatttttgtatttttagtagagacagggtttcaccatgttggccaggatggtctcgatctcttgacctcgtgatccgcctgcctcggcctcccaaagtgctgggattacagaaaatccctgctttatacactgttacaggtaaatatataacccaggcatcactggaggccgtcgtagtcagtgctggttgcaccagtaatgattgtgtctacatgcctatagatagacagaaaggaatcacctgagtagaagacggtctgccacagggcaccaagtcagaaacctctgaataatgccttttcattatctacgtgaccttcagtaggccctttgccactccaagcaaactcatctgtaaaatgggagtaatacctacttcacagaattgctgtaagcaacaaatctattctagtaccagttaccactcaatgtttaccctttacccttagactagagggggattcacaggtaaaagttttgggctagataatcttaagcaagaaacaatctctctgatctccatttcctcatttattcaatggaataaatacgattggtagagcaggaataatagtccctgctctaccaatcttatttggttcacctgagaatcaaatgagataatgttcatgaaagaaccttggataattgaaaattgccatacagttgttggatgttatggttattattaacattataaaccattttcatatttctcagtaccctaggggggtaaagtctctgttgttattcttggtttttcagtgaaatcattttgagggtaatgattacaaaagcgatgaggctaatttagtactaacgcaatgctagtcatttttccaggccagatttttagcaacaagagaaagtagggcctcacctgcctggcaaacaaaggagtctattctgtattcatgccctatcagattattcatggaaggtcttctattgtaaacgagggtctgggacaaatccccctgtaggtctgcaggagaacaaacttcaagaagctgaatcctttaaacagtcaagcttggctccttctgattacactgaggatatgctaacaagcacaaggggcccagtgtctttttgccaagtgaaataatcaaggagaacaatacatggtcatgttggaagtgacagaaacacattcaggcccattgtaagtcttccatacaaagtgcttccttccctacacagctctctgcatttggccagaaggggattcagtctctgctggctctgaaaatcttctataaaaatattccatagaacaatgagccttccaaatgaaaaattagaaaactaatatctgcctaggttctttttgaagtccgagcatttgtattcctcattttaacccggaaggcacattggtgttatcttgactttacacacagagaaattaagaccgagaaaggaaaaataacttgtcaaagctacaaagtagcaaagtctgggttggaatgcaagcctgtctaccttcagtgcttctagtaaattatattactaatcaaaattaccctaaaacattatatatataattgtttttcatcattctccttaagagtccgaagttctctttcaatgaagactaatatctggtgggaatcatactattttaagaaaatcactttggaacaatggacattattcttactagtcattttaaagggtaatggacacctccaatgcattacagagaaaatcggctggaaattagaatgttgaagatttttaatactttggaataactgtttaaaagtgaaatgcacatattagttacatcaagttaaatacttgagatttttgaaaccaaccacttagtccagatcacatgattaatttccttttaaaaatcaaacaatttggtatcacagttcacatctgacattcctattttatttttacaatgatattcaatactttgattagtaattaaatataatggagaaaatactcctttctttccctgaagcttaaagcaaagtaatcatgatttcttattaaagaggtacttttaataaagtgaaacatcatctgggatattactttgagttaaaacaagaaaaggctctggttttaaatatggcaaaggtgggaagaaatcttacagaaccttagaattcaagggaaattaaacaagtttaaattataaccttgactgaaaaaaatttaaaaaccatagaaaacaaacaggaatcactaccaatttattacttgaaaactataaaataagcaggttggtagcacataggggcctgcaccagtgatttaggcatatgcctggaaggcgagagagagaggtaattaggccttcagttggcaggctgggcccaggcattcactctcttgacttgatgatggaaatactaagtagatgatctattgccttatgtattctcaaatgaattctttaaaaaaaaatgctgaataggccatatacattgattaaaattttccctgcagaaaaggttttaactacaataagttagggagagcaactcatttgtgagcatttgggaaaaatcttagtaactggaatccacacaagttcactaaaagtttctgtaaactctcagggcctcagtttcctcctctataaaagaattgggctaatcttttttaataattaaaaaatgtttaattgtaaaaaataccgtaaaatttaccatcttaaccatttttaattttacatttcaataatgttacatatatttattcttgttgtgcaaccaatctccagaactttttcatgctgcaaaactaaaactctatgcccattgaataactccccatttccccccttcccccagccctgacaaccaccatggtactttctgtttctgattttgactattttaggtactgcatataagtggatcattcagtatctatctttctgtgactggtgtattttacttagtctaatgtcctctaggttcatgatgctgtaccatgtgacaggatttccttctttttatgactgaataatattccattgtttgcatataccatgttttctttatccattcatccactgatggacatttgggttgcttctgccttaaacggctatcatgaataatgctgcagtgaacatgggtgtacaaatattttgagaccccgacttcaattcttttggattaaatactcagaaatgggattgctgcatcagatggtaattctatttttaattttttttaggaacttccattctgttttccatagcagctgcaccattttacattcctatcaacagatcacaatggttccaatttcttcacacttgctatttttttaatagtgcattctaatgggtgtgaaatggtatctcactggagttttgatttgcatttctctaattattagtgatattgaacatcttttcatatgcttttggccatttgtatatcttctttggaggaatgtctattcaagtcctttgcccactttttaatcgggccaatctttaactgacaaaattctataggttgtataaaattaaatctctttcattttgatgagattattagtgacagactaagcacatttaaactttagcaaaacatttgatcaaatgactcaagtgacttatgacattcttatggacaagatgaaaggttgaataataatatcatcagatgtatttgtaattcatcatctgcctttatttaatagtgttaatcagtcaatcaacatcaaattgtaaagggctatgcttgaggaatcctgcctgctcaacattatcattgatgatatgtttatcaaacttgaaatggccagaatctaggaaagatacctaactgtttaattatggaataaaattttagaggatcgtactcgacaggctaatataatgaatccaaaccagaagctgaaattttaaaaataaatattataagttgctttaaggttaaagatcttgtttataaaatccatgattagacaaatctactaaataattgttgatgtaaccaaaccctaaaaacaaacaaaagattactaataagttttactgaagatttaaaggctcagatgaacccagcaacagcatgatgcaattgctcaaaaaattttacatatggcacttatagcaacatagtagtattcattggcaatactgggtaatgatcaagaacatcgtggtcctcttctacctgctctggttaaaaagcactgaaaggtgtcttctaagagccacatttttaaggagggctctaaaggactaggaaacacctagaggagaagaatggggaaggaaatgtaggaggacccatgtgatctttaggccaaagagaaaatcaaatgaaggatgtgacatatgtcttcaaatttgtgtaagaaattatccagaagttaaaatttggatccagtccatagacttgttctttattaggttttttaaaaaattggaatcagtggccaacatttaaaaaaaatcagattttgcatacgagttttggtttctagcttacaaaggcagaacttttgagcagttggaatcattccataatcactttgaagtggaaggatttctctgtctctggagatgtctggcaatgttcaagtagaggctggatgatttctatggttgctcccaaggttctctgattttataaattcagttgaaataacttatttaggcccttactgaacttttttttttttttgagacggagtgtcgctctgtcaccgaggctggagtgcagtggtgcaatctcagctcgctgtaacctcccctctggggttcaagcaattctcctgcctcagcctcctgagtagctgggattacaggcaccctccaccacacccggctaattttttttttttttttgtatttttagtagagatggggtttcaccatgttggccaggctggttttgaactcctgaccttaaatgatctgcccgcctcggcctcccaaagtgctaggattacaggcataagccaccgagcccagcccatttctttcttgaaacaatttatttaaagctgactcttatgaagcgatttaaagtcagtgatgacatttcccctgagtatcctcagcccaccagatccagtctcagtcctttctgaccagctccttgctgaggccaacctctactgatagtgtcaatggatacctttgacctgtggcttccagttaggttgaacctatgggagtcatttgccagagatgaaaggcaggagaagagtatgggttgaaacccttgttcctctggcttcctccttgctgggttgctgagggttgactatatccctctaccaaaggccacagcatgtgctggacagccctctcttcagtctcagctatattctgcaaggtaaggtaactgatctaggatggtaatacctcccattcatgttagccccaggtctcgcacctttccttaatggtttctcctaattctgccaatgcctccctaaataattacattataacatttcccttagtctatcggcttgtgccatgtgtttcctgccagaagcttaaccaaaaaacagtttgttacaaagccagtggcaacaatcattgtggtattatatcagatttctgtcagcaaaggttaagacaccaacaagcacttcttactggcatggtggtgagcccaaaaagttcagaggtttcagaagcttattgctagagcagcttacacactgggtaaatgactcaatatatactaggaacaacaacaaaaaaacctttgagagaaattattttatggttaaaaatgttcatggaacatgacttagctataagttttgggtcactattgttctttactttgttgttgaaaatgtatagagactggaaatgaaagcacatcttgaaaatctctgcagtataaaaataactcttccagaaagcttcaaactatataaaacagtgctatacttcttcctcctttaccccctccaccatccaattcactgtaacgttcaattttattttgaagaaatggctgaaagacaaattgccttacaacaggtcttctatgaaatatgggagaaggctgctgacagagcaagttaaaaatggcagtgttcacaatctggaaaacatctgccttgccccgaactgtaaaccaccacgttgcagaatatggtttgtgacaaactggagcccagggtgggtgtttgtaagattataggacaagtcaaggctattcaggcacaaaactgggcaatgcgccctttggcaaattgttgcaagccagtgacttaaaaggaaatacaaaagcaataggccaggtatgaaaactccaaatggagccaaatggttcaccacttttcttatcatggatactctttggtgaagctggtttaggagtaaaaacaatactgctgcttggaacttttatttggtagagggagaaacctttacttagaggagaaacagacatgctggcatggctaggagaagaaatgtgacctcaggatttgatcaagggtaaaacaaaggcccatggtttaaatataaaaataccaatacgattgagattctgccttcccatacaaatcaagaaagaaacaaataggggatctaaatgagagacagagagaaagagagagagagaacataagtcttgtggtattaataaaatacaaccaaagtaaaatggacagattgttgcaaaaggagttctcagaggtattgacagtttccacagctacacccccagagctgcatagaaaagcaatgataaagggctacagtgaaatggtgaacctaggcagtgtgcctagatgccagttagaaagaacttaggcaaaatgcttctttctcaatttagtttacacccaacccaagatatttgacttggaaggtgaccacaacaaaaggtgaaagcatagtgaatgaagctttgcaggcagagaagatggccaactttgaggactggaggagacatggggcttccagaaagagaggagatgggacttaatgggagaagggcacaccctgtgagatgtgggtggagctgctggggagctaatctatatcagggctgcatctaagaggagcacagtagggtctctcagagtagatatctttgtggctgggggcttcattcctatatccctggagctgcaaataagaatatcaatgggcagcatcccaaagacccagagagatcataatgatcaaagggaaagggaaaataataaaggaatgtgtgttcctctgaaataatcaggactctattgtttaagcagttatggcatggtagatggaggaatggatatgaaattctatggaattggtttgaatctcggcttcagtaaaaacaacattgcctgtttttcctttaggaaaatggagatgacacctttatcttgtgtttaccgtgtggattaaaccaattaattcaacacattttattgagcaccaactaagtcctaggctagatgccggcacagatatcttagcacagtattcaacaagcagtagtcatcattaaaatgccacgcacataagagcagacataaaactgggaactatatgacaatacttaatgtgattcatatttttttttccatctgattccttcattagattgtaggctacacaagggcatggtctgatttagcttgttcacagggtctgagacacagtagaagctcaacatatattggtttctgtgagtgaatgaataaataattagtaattctaattgttagatgcctgtgacatgaaagaaaagacatggaggatgagaagccaggtcttgcccaaaccaacttttgtcttttttttcactttctctaagcactgtctgggcatatgcatataatcctagccaagccaattcccagaatttacaacagccatatttgattgtacttaattttatattctgctctggagtgaaggttcacagataaaacaatctgcagcagactgttctcaagcgcctttattagagaaagtacaacaaacgttcacattttctatttaattaggcctatgcttcttttagctctacttagttgaaactaaaacaaaagttatcagtaggaaaatgagaaaccccatggagattctgaaatctccttaactttgagttagctaaagaatgcaggaattttcctatgagactctgtctcattcaggatggaggagaaaaagggctcatttcaaatctgccccactagcttacaactcactgtaaaatgaagttattctcaagttttatctgtttacacacacaaaaacacatacacaacatacatgcataaaccacagtttaaaaggctgagtacagatgtgagtcctgggtccacttcttattaaccatgtgacctcggacacatgttacttaacctctccaagtctcagttttctttcttgggtataataaaacctactcctagggggatagaactatttaaacatgagataatgcctaaaagtgtcagcagagttttcagctcattgtaagcatacaataaatgataattactattgaatattattgttattctatagtttacaattgtacagtgtagaaaagagttcctcaaccccaacattcgacattttgggctagatgattcattgtgtgggctgttctgggtactgcagtgtatttagcaacatccctgacctctacacaacagttgccagtagcatcccccaaccccacccacttgtgataaccaaaatctctccagaaattgccaaatgttccctggaagatgaaattgcccctggttgagaatcactggtgtagaacaaagagcagtggtcctagagataggagacctggtttccatgaattcatttgtgatcttaggtaagccttctcacttctctgggccttgattttctcatatggtaaaacagggctggaaattcctacttgatctttcatggttttgtgacaatgaaatgagaaaaaaaaatcaaatgccccaaaggagttataaaaataggattccatgatgatcagtttgttagaggtgggctgagggcgactgggagaagacacgcatacccctgagcacagctgatgctgacctactgtcttctcaggaatcccacctgggagctactggccctccagcagcttattgatcatatgtcaaggcttccctgttcctttaatggatatattcgtggcttggcttgaagaattcaagaggaactgctttgttttaaaataaaatgaaaatgttctttaaaaaaaaatctaagtggtgaaaactgccttgtcatctctatatttaactttcatctaaattcatctctcatgtgactagtattaaccagtcctcaggattttcactgtgtcctctgcacatatattcagaaaagaaatattccaagggttttcaacattgctatactgattaatactaagataataacacactgagtaatactatgatagagttcttcatcagcacgggaagattttgatgtcatatcatataatggaaatcggcatgatgtaatccagaggtggaaccaatcatcatgcttgtatttatttcagaaaaatcttcaaatgagagatagcagagtgtctggtaaaagaacatgagctttgagtttggtcagagctctatgcagacagtggttggctgtgtgatttagacaagtcctgtagcccctttgaacctcagtgaaatatgttaatcatacctaccccacagcatggttgtgaattttaaatggagatgaatatgtaaagcaccaggcaccatgcaggcacatagtaggtatcctgtagatgtaagtgatctccctctttctactcagtctgaaagacctttcgaaggtttctttcatccctcctagcatgggtttgatctggatgctgcaggaagggcatcgaaatgaaaacgagtactttaggtataatttgtaatccttgcttaaactaatcgtaatagagcttgagtccttgaatcagagtatcaatatgtcttccagcttctggacaaattacttccctacttctgataggcattggttggaaattaagggtcagaagtcacccaaagaacaatagtgtttacctagggtggaacaaataatgcttttcttttctttctttcttttttcttcttgagactgagtctcgctctatcgcccaggctggagtgcagtggtgcgatctcggctcactgcaacctccgcctcccaagttcaagcgattctcatgcctcagcctcccaactagctgggattacaggtgcatgccaccacacctggctaatttttgtatttttggtagagacggggtttcaccatgttggccaggctggtcttgaactcctgacctcaagtgatctgcctgccacggcctcccaaagtgctgagattacaggcgtgagccaccaagcccagcccatttctttcttaaaacaattcatttaaagctgggcatggtggtgcatgcctgtagtcccaggtactcaggaggccaaggcagaaagatttattgggcccaggagttagagaccagcctgggcaacgtagcaagatcctgtctcaaaaaacaaagaaacaaaacaaaccagttcatttggtttcctctgtacatcaaccaataacccgaagtagcacagaagagtagcaagaagatgagcttggaatcagacagaccttccatttactagctggatgaccctggggctttctcagcctcagcttctgtatcagcaaaaatagggttaataatacctgtcagagtatgaggatgaggataaagaaagcatgtgaaaaccctagcactgtgcctggtgcgtggaaggtgcttagtaagtactgcttttatcctggactctcttgcagactctcataccttacctggtttaggagaaggaatggggcaactaagtaaatctatgttttgtttttattcctttcttatcactgttgaaaataacacggaaaatgtcataaatgaagtgcaaaccattacaaaatacagaataattttccttgaaatgatcaacaatggctctgcaagaggttactttgtaatacgtatgaaagtatattaaagcccatatgaaggtgtatgaaacccggcaacacaaagggggtgtggtgatctttctaaaatttgttgtgttcaactttccgtaaaaccattttgcaagtaaagtcactataataacaagtaacaggtaggaacaaaattatagaataagggtctctcaaattttcatcactagggttcttttcaatatttttaaaactttttcttatggatttctttagtaattttttaagcccttccccttctttgttccataacatttgtgctaacttctattgtatcatacatactgcattgtaactgacatacctcaaaagcatgaatcattttattcctcttataacctccctactccatggtgggctctcaaacaatatttgctgagctgagagcaagcatttatttacatatgttgactatgtgataattcgaatcgatttatctttatatattgactatataataatagataatgtgtactgaacatttactatgttcggacatcatagggtttttcagttaacaactaatttattctcacaataaatcctaagtgtatatcattattttctcattttactgataagaaaaatgagattagaaggggctaagagcacacagctatttcattgaagacctgggattcaaacccaggcacttaaacatgagaacccatgtccttacctattacaataaactgcttttactacaaactatatatttattgtttacctgttattgttgccattaagcagattcattttgctctctagagagagagtatgcttagtggaaagagccaacaggtttgggaatccggctgacctgagttaaaatcatgattcagtcactgatagctgagtgtctttgagcaaacctcttaattcttactgagtgtcagttttcttatccataacatgaggatgatagaagctggatatgaagattgaatgaggtgacagaggtaaggtgtctcacataggatctggcacatggtagccactcagttagatcattattacattaggaactgaggctactgcccctgacccagagtctaaagctagctttcattgtcttgcactgacatttccttctcttttgttaagtagatatgctcctctttccttcaggtgtcatggccttacatgccatctgtatgccaacatttccttcgtatccatctcatcccagaccctgacttgaacttcagtctgtgatataaaactgcctcctcagtatctctttttggatttctaaaaggcatctcaaactcagcatgaacaaaaactcttgattccagctcccactaaatttattcctcctatagttttctccgtctcagcaaaaggcaattccatggagaagctccggagtcactcttgattccttccatcatttatatcccacatctgatccatcagtgactcctcttgtctccaatttcaacacatatccagaatctgcccacgtgtccctccgtcttccactcctcctcctgtcaaggccactttatctctcccctgcattcctgcagtagcttcccaactgatctccttgcttttgctcttgcatccttcccacaggctagtctcaacccagcagcccaggtgagccttcaaacatataagtcaggtcatgtcacccttctgctcaaaaccctctcatgctttcccaactcattcagcgtcaaagcttaagtcctccaatggcctacacagctttacatgattgggtcctgttactttcccgacctaatcttctgctactctcccttttgcttgttccgcctccatgactccttgcttctttgtggatgtgctatgcctactccctccttagggtccctggcgtctccccatgctcggatgagtaagtacttggcacttagtaggtactcaacaaatattctgaatgaatggcttgaataatcatctggttaaacaccgagctcactttgtattgtgggtcccatgactattgctcttgtttgcccaccctcctaccctgtagcttttgcttttccagcagtgacatcctgactctcccactatgcctgggaaacttggcattatctatgatatctatgagaactaggatcaggaagatgaattagttccaaaatagttcctaactccaggtttcaccaacattttctttttttttttttcttttttttggtagagatggagtctcactatgttgcctgggctggtcttgaacccctgggctcaaatgatcctcctgcctcggccttcctagagtgttgggattacaggtataagccaccatgcttggcccattttcattattttctccaaacattttctagaaaaaggaacagttaactgactcaggaattccattttcttactagatacctatatgcttcttctgcagtattaacagacataacgaaggacacagtttacccacagattgtcctggatgaccgagtaatggttgtagattcatcctgccttgtggtgttcttaaggcatacagaaaacaatttcttcctgcttccaatattcctttttttgctgaaaaggtccacttggacgcagaccattctgggtaacatctttttctataaaaatcaatgtgataaactgtctcaactgtgcctctgaagggctgggtccctgttacatccatgagtgcaatggctgcaggtataaaggcagttgacttcttgagaacgtgttttggtaccttacgaggtgttttatgtagaaacggcaaggtttaccctaaaaccagattgagatcaagcaaatactgtccattttctttgccccccttataggattctcctaaataagaggggtaggatagggatctttaaagatgattgaatacattaggggcaatgacttctatttaccgcacgctgggatgtcacacagatcagacttaaagttttcatccaaggtgaagcaccagggagcttccttttgattccctgggttgcggcagtaggaatggcctccattcagctctgggaaacgaagggcggtgaaagtgtgtgtgtggggatactgggaattccatggctggcactggcgccctgatttggtcacactgacggtcccccggtagtccacacctgtgctgttataacacttgtgatctgaaaaacacacaaaaacccaaacaattagaaagaaacataggagatgctggagctctcctctagccagcagtttctggaggggagggcaggtaattaacctcgtggccacagcttccctgctggtcaggggccatgcaggacagtctccctgctttgctgggcttggacccagggcctgccttgcagttacattcctgggaggatttaaagcttttgcttcaggaataaaatcagtcttccaaaagtatttctaacattgaacacagaagaaatcggaactggggtgggacctgggggcacagaagtaatttcctagtgaatggttcaaggaaggttcaagccaaacttttccttccattctgactgacagccttagacatgaaatcatgtaataaggaatctagttggtattgtaattcacagaacatgcttatcagaggctgtgcattctgggtttctaacaaaagtgggggctatctctgtgctgatggggtcggcacccttgagaagcagatcccattaagaagacctcgcacgtggccagaggggcttaaaagcactgcagaatctacacagtcgaactgaactggagtttggaggagtaatgacaataataataatgttgctactgagcccttaccatgtgttaagcattttagatgcactcatttacttaactcacaaaatagtattaacgatcaaaaggaaactgaaaaattgccggtgagattaattctagatgaaagggaaatgtacactgaaatagtcttttgcgtggtgctgctgatggggtaggggatggaggcaaacccatctatatctttaaaatggcggtatgatatggtttgggtctgtgtccccaccaaatctcatgttgaattgcaatccccagggttggaggtggggcctggtgggaggtgactggatcacggaagcagggttcttgtgaatggtttagcacaaaccccccgtggtactgtccttgggatagtaagttctcattctcatggccgtttaaaagcatgtggcacttccccactcactctcttgctcctgccatgtaagaagcttgctctccgttcaccttctgcagaagctgctatactccctgtacagcctgcagaaccacacgtgagccaattgaacttcctttttttatcaattaccctgtctcaggtatttctttatagcaatgtgagaatgtactgatacatgctataatacacttaccattacatgtaccattagtgcatttatttagttctttcacaatattgtacaaccttcaccactataggttctagaacacttatattaccctaagaggaaaccccatatctattaaacaatcactctccactacccctagcctggcccctggtaaccgctaatctgaattctgtctatatggatttatctattctggaaatttcatataaatggatcatacaatggtgtctggcttcttttacttagtataatgttttccaggttcatccaggtttgtagcacgtatctgtatttcattcctttttatggataaataatgtttcactgtctggatataccacaatttgtttaaccgctcctctactgatggcatttgggtcatttccaccttttggctattgtaaatagtgttgttataaacattctcatatgagtttttgtttgaacatctgttttcagttcttttgattacatactcaggagtagaattgctaggtcatatagtaattctatgtttaagttattgagaaaccagctccaatattttaaaattattgtcttcatgaagcttcttgaagataactatgtctaatccaccactgaatgctcaggcacagtactcagcccattggaaaataatttgattaacagtatgaaaatcactatgggtcaaggtccagttttccctgtgccaacaggttgctgacccttagaagagcacagaaggtcaggggctaccacttacttttatttataggatctgccatgggaattccaatccggatacagttcgcagcttctgggctctctggctgggggagatcttcacagtttggcagtttcagcctcatcagaatcatgggatttgatcttgcaaaaatgtactctgtttgacacaggacattctccaggatttcacattcatcgcgacacaagtcacggggctttgggacggatgaagtttcatcgcagtacgggaaggcatagtggcacagggaaggaatggcgaactgagaacacttatcagataagtgactggaagtgccaatcatagtgaaggcagctggaaaacaaacacaattattaactcccagaggccagggtttatcttctttggttatctagtcaacggatatcagatataaacacacattgcaaggaatccgccgtgctgaaacagacaaggcccagagaaggagattcatttcagatgtctaagcagcttactttcactggcttgaaaaaaaccattttgactacaaagttaataaaacaggattaaattacatatgtaccatttcctaataaaaaaattaattaagttaaagtacaatatatttttcattttttactacaaagcaatcgaactttgtgtttcatctggtgctttttattagttttgtgaggcttctaaaacatttgacagctgtagggacagaacttgtttccgcagtggctgagcctgagcacaggatccagttctgtgtcttgctggacggcaagagttgctggatgacttagggtaacttgcttaatttctttgtggctggaatactttctactccatcttctgaaaatgaggcaactcacttggaagttctcaaagagcacagtacaattgttccaatgtgtatcatcgaatattagtggttccttagcttaatctcttactagtagggtaagatgcacaaaaagcgcaccagcctacctttgaataccgctattgacaaggagcttacacctcacaaggaaacctaggaggttgctgatacattatttccccaagtatgttgctcagaacattaatcatgtgaaatagaatagtgcttgagaaacaagccaacaagtttgggaaacgctgggataaacaaaggtaaatgaatttaaaaaaaaactttccaccaggctgatacccattagaaatctccaagagaggatttttataaataggttaccaattatttacatcaaaacttccactttttttttttttttttttttttttttgagacagtctcactctgtcgcccaggctggagtgcagggttacgctctcagctcagtgcaacttctgccttccagtttcaagggattctcatgcctcagcctcccacatagctgggactacaggcatgtgccaccacacccagctgatatttgtattgttttttagtagagatgtggttttgctatgtaggccgggctggtctcgaactcctggcctcaagtgatctgcccacctcagcttcccaaagtgctgggattacaggagtgagccactgtgcctggcccaaaatgtctacttgcttttgtggatattcagttaaaagtacattaaggcattcttacattaggttgaaatgggtgtttaacagctcctccctgtcagtcttactgctctttgaaatttcagaattctcttcctgttgaaatgagggcttcagaaaatggcaactacctattcctacagttgcttcttttggttggttaaaaagtcctccaggaggctgatgcaggagaatggcatgaacctaggaagcagagcttgcagtgagccgagatcgcgccactgcattccagcctgggtgacagagcgagactccatctcaaaaaaaaaaaaaaaaagtcctcctccctcttccccccagcctcctctcagttccttcacattcctcatagcacatagcttccacatagcttctgggccttttgctgttctatgtttctgccttgggtttgttcttacctctcctagaccctagggttgccagataaagaaaaagacaacggttacattttaatttcagataaatatttatgacatacttatactaaaaaattattcgttgtttatctgaaattcaaatgttactgggtatcctgaatttttatttgctagatatggcaacctcattagaatgtcatgaagacaatgtgaatggattgcaaaggatacgtgacacagaggcatcataactacactaatggaaggggacaaagctgctgtaaccaccagaacgatgcgtgcaaaatcctatgaggcagcctatgctactttaactcatgtgtgctagtaagtgcttcgctattagatttctatcaaaaggatactttcaattaagaaaaatgaagagtgaaatattgaaagctagagcaagaagagaccaatggtcatcttgcttcatcactcatttcacagatgaagaaggggactttttgggaaagtaagcgatttccccaaagttcactgtcataatagttctgggatgagtgtccagaactctaaactctaaattcatcccctctcagtcgacatcatgttgcttctaaacagtaagctctgtgagggcagagacgtacctggcttatttacacaccatcacctctcccattcagattcagttcctggtacggtgaaagcacttaataatatttattgagtgtttgaatgaatgtgagatttcacaaagcttccttttcctctaagagcaaccttcaataaattactttaatgtaaattccagagcacagagatcatgtctcatgcttttttatggtcctgctcccaacctccatgctgagcttaatcctttgtcaagagaggagctcaataaaacttttggcgagaaaaatagttattcaagggacaaatataatttcattggtgctacctacctgtgatctgattttctatttccccttgcatgtgcaaagactccatatagacggtgcggttgccaataaatcttgcacatgcaatccctctgtatggctgacagaatccatcttcttcatactcatctctgaaagaaagcatagacagacattagctgatgcaccacatacatacagggcacagcaagctctgactgcgcgataccctaaatagtcactagggggcacagttgggcacaatatacaaaagactgggctaaggaattgggcttttgctcagttcttaaaacatctgttggtcacattggtcaagtttcctacacccccagaaagtcatcctgaagcacaaaatcatccttaaatatgggagaaaatgcttttattttcgcagctggtggtgggctggaagatgatgtagttataggagtaaagaggaaatgagttggaaatctgggcacatgttctacagttttttgttttttaagcacagattatttctgcttcatttgctacaaaggcgtgggcgaacagatccactccaactgacacgtcaattagggggatccatggggtgagaagctgggtgcagctggaaagaaacccgagggtagcccagttaggtgactcttcactgctgaacctccattatctctaccctgcccaaagaggaccagggcaaaccatagtctggagagtttgaattgagtcactaaatccaaggaaatctagagaaaatgtccatggaaagtttgctttcatgcttctctacaatttaaaaaaatagtcttattaaaattttgcggcctcaaaattataagactttttttataaggaggggtaatagatttcatcttgaagacagagggacaccagaaatgacatgattcatgtgccaggtaaaaggactggagatctaaggctggagatgaagacccaagatggcaggctcaacctgaaagggcagaggctaccatctcccacgagggcctacgatgagcacaagatccctcgagtgcagaacatccagctgtttctcaaaggcagaccatagccaaaccaaagtctgcctgccacgtgtataagttgacttcaaccctggatgctcctcctcaatatatcatctcaaaaaaaaaaaaaaaaatacaccgtttttcccctttggtttcttctaagtaaaaatccctcagagcaaagtcaggagaacaaaattctcttcctgagtttaacatttgggcatccttaggcaagctgtctgagccctctgagccacaattttctcatctacaagttggacacagtaactgacttctctgccctacatgggaaagtcattatgatcccatcagataatgtaaaagcttttttaaattgtagagataatatatggctattcttaaagtatttacaatgaccaaagggacatttatttaaaagacagttatttactaagctcccacatcgtaagaggcactgcggttagtgctgtggtgctcacttcccagcttgaaggtctagcgtaggagtctagaaagtcaaagtataggagcaaaccaagtggaaaaatcacctgataggacactaattttctgcttctctctactcccattcattaaaagaatcattttaaaggtgaaagtgggggaagtatcttcagtttagtactgaaaatagtttgtgttgcaaagctcttaaaaacttaacctttaaatacacatacaaatgaatatatcatatacctgacataaagacattgaaattttactgttgcacaatcctgcaagcactccacatgtttactttcataaatcctagagtaatgctgaagcctttttggcttaaattttacttgggttgtaaaattaacccaacttttattgggtaactaataccataaacctatggggagaaagaaggttcttgatgacccacacttggatcttggaaacctaagtacagagaccagaatacacccccatgccacccccctgctattacagatgatgcttttctatccctaggcattagcagagccctggatttttaaggtgtcattatgagaacacttctttctcccccacattaaactctcaaggcttcaatttatatctcttgggaggacaaaaccctggaattacccccagatataaatccccaacctactgggagttcccatattttatgtgtgaggcttaggctaaacttcttaccacctttccagttcaagactcttaaaaagactctttgaatactttttttcagaataaaatggaatgcaattccttggctgcacatttcttatcaaaggcttagaactgcaggtgtattaaatttttgactattcccagaattcctactatcctgttcagtctcctgggagacagattttttaaaaaagaacacaaaaaaaccccaaaaccagtatgtactgttatctgctggggagtggttctgtcttggctccttatgagaatcgccttggcagcacactgggaggccgagacgggtggatcatctgaggtcaggagttcaagaccagcctagtcaacatggtgaaaccccatctctactaaaaatacaaaaattagttgggtgtggtggcaggtgcctgtaatcccagctagtcagggggctgaggtaggagaatcacttgaacccaggaggtggaggttgcagtgagccaagatcatgccacttcactccagcctgggtgacagagtgagactccatctcaaaaaaaaaaaaaaaaaagaatgaaagaatctccttgagaagctttaggaaatacgaatgcccaggccccaccttagacctattaaatcatagtctctggggatgaggcttaggtatctatgcttaaagaaacctatcaggtgatttgaatgtggttgagaaccacaacactgaaaaaaaccaaacatgtattaagtgtctgctgctctgggctgggtactgtgttaggtgctttcttcaaagcagcccctgatgagctattatccttattttacgagagagaaactcaaattcagagaagttaagtaacttgctcaaattcacaaagtcagtctgtggtggagctaggatttaaactgaaactcaagatgaggccactatcccatgttgttagatctgtaactatgttctgcgtttcaatactactcttagttaaatcagcctactcgagaaagagaccttataacgagtcttgattctgtatcagatactgctaagttttatatacttacaaaacagatactaagtcattttatcccaacaacaatcttataaaaaaaggtaaagatgtaattattcctgttctacagatgagaaaagtgagactcagaaagcatagagaacttatccaaagttacgcagcaagtagaagagctagatttgctctaaatagtgtttctaaccacactctataacttctttccaagtggcttggcaatggagtttttgcactgcttagaggggctttctgctgtggagaagctttggtgcattctgggtggtaaaaggttttcttttaaacataaagtcaaaaacacatttctttcttttccatttttccccactggctttggctggaggggaacaaatgctcctccagcattaatcagctttatgcttttttccagctcacacttctttcatcattgatgtcttcctgccttactccatgctcagcaaattaaaaacatgaagcaagtggcaaggtagcaaaagtgcaagggcacttgcagtgagcgtgcccaaggctgcattcaatggagaagaaaagtgcattgtgaaagggcaaatggaatttggccattcatcacagtggctggcaccagcgtgcgccgctgcctcaccatgatgtcaaggtgcaggggtgctttgtgatgggagctcatgtttctcataaaggtaattgagttaccatgttgccagcctctacaacctgccatattctctgccatgggattgggaaacgcaaatgtggtctgtaatccacctccagggtctcctccttctccagggcaaggagcttatgaaggatatttgaagagtgctaagagggatcgtggaacagtgcggcagcaaaaggagtgcccatctaggaaccactgcagagcaaggaaaggaaatgctgttctgcagagacttcataatctagttcttgccagtttttccagcttccttccctgccagacaagcctacaagcctgatggtattagtcatgtggatgatcttgctagtctcaaaccacaggatgcacttcgatgcggacatggcttgacccatgctcatccttagggctggcatgccctccaccccctcgttctccttgtgaatgttctcatctttcagacccaaatgcccctaccttccctggaaagttagtcactcactaaccccacccattcccagtactttcatcaaaccattccacagatttccagtttcatatactattttatctgtttagcgcccaccttaccactgacaggccaatagaactagaagagatgaggagactatcccagggtagcccaccaaagtggacccttctccataccaggagtatcctctaattggaagcgattttcttcctcatcagaatatacagggcatgggcagacatagctgaaccgatcggtactgacaaatttggtcctaaaatattctttttggggataatttcagttaaaatgcctatctctctctcttttttttttttttttttttttttgagatggagtctcgctcccattgcgcaggctggagtgcagtggcgcgatctcagctcactgaaacctccacctcctgggttcaagcgattctccttcctcagcctcctgagtagctgggattagaggcgtgtgctaccatgcctggctaatttttgtatttttagtagagacagggtttcaccatgttggccaggctggtcttgaactcctgacctcagatgatccacctgccttggcttcccaaagtgctaggattacaggtgtgagccaccacgccgggtctcctacctcttcttaatgagaagagaatggatgcagagggactttcctgactgtaaaatctcacttaaaccaaagaattgaaaacaggtactcaaacacacacttgtacacaaatgtgcagagcagcactattcacaatagtccaaaggtgggaacaactcaggtgttcatcaacagatgaatggatagacaaaaggtggtagatacatacaatagactatattattcagccatgaaaaatgaatgaggtactgaaacaggttacgatgtgggagagcctcaaaaacatgctaagtgaaataagctgaacaaaaagggcacatattgtatgatcccatttatatgaaatatttaaaataggtaagtctttagagaaaagcagatcggtggttgctaggggctggggacagggaggaataagaagtaactgcttagcgggcaaggaattttattttgggatgatgaaaatgttttggaagtagacagatgtggcggttatacaacattatgaatatactaactactattgacttattcattttaatatggttaattctggctgggtgcagtggctcatgcctataatccccgcactttaggagatcaaggttgggaggattgcttgaggcctggagttcaagaccagcccggacaacatagtgagactctgtgtctacaaaattaaaaatgaaaaaattagcagggcatggtggcacacacatgtagtcctatctattcagggggctgaggcaggaggattgcttgagtccaggagtttgaggctgtagttagccatgatcacatcactgcactccagcctgggtgacagagcaagaccatctctttaaaacataacgataacaaaataaataataaaataaaatggtgaactctatgttatgtgaattccaccttaattaaaaaaaaaatatcatttacacaagggccaaggtagagggaccttgggagagggccaatggttgcaaattcaggcctcaaggtgggggaggtcgtgggggtagctttgtaagtcacttccaagcagactaaactgatataagcatgagcagtttactcagtatcagcaggttcttttgttctgattctcatggctcttcaaatggaatgccggggacagtgacttggcaatcccacagcatggcagcctcatagggacagagagcagtgaaataaatagcccaacacctctgacctctgaatttatccccccagcccctttcatacaccctgttttgagccatggagaggaaatcacatcaagatggctgcccctaaaacccttgaaggaaagtcatcacacagctcaaagagatggacggtccataggtttgctcagtgagcagtttattaaagtgggagttattttctgtcatatggatagcaatttctctttacccaagcaaacacaacttactaatgctttcccaaaagaccatcatggccatgaataaatggaaaacatccctttttaaaacttgtgaatcgggccacctattagcagatctggttaaaagcatggccacataatggctctagtaacctcgagctgagtgtgaagcttcccacttcagaggcagcgttcttctcccttgggaggggcaaacagatctctcaaggtaaaattagccctggcttttaataaaaatggggctacattataaaattaaggatccaagtaaaagatgcagaattattccaatgtagacagaagatcagagacatagaaactttaagaacagattataattggaggtggtctgaaaagttacctcctattccaacctacctccttcctcttctggaggagacttcaagcctggaagcaaccttagttaactgctaaccaggaggagggggcatcacttaaatcttatcagccctagctgcacacaccttgaaatgatggccctgggagagggagcatctctggacaggtataggcagagacaaggaaagggatggctggggagggtgaggatccaggaaggggagctgtcgggagcaccaaaagcagacttcacctcaggctggctgtggtcaagagattacaggttaaatatgtgatcctgaagttatctcacaaactctgctttctaaagaccggtctgaaagtgagcatcaaaaagtacatgttaacatacttgacctttaaggtcagttttgaaagggagccaatcaaggcatgtcaacccagagggccaacgactcacagagaagccttaaatctatagggttgagaattcagctaacccttacatccctttttcttttattggaatgcctttgtaagcataagcaattttgaggtgactgtgtcgaatatcacatgctggttcccacatctggtcagtgacaatttggttaacatttattcgcttagctaaagagtccctcgacctgtttcataccacctttttttctttaaaaaattaaatcaaaattttgaagtttttttcccttggctattaaaacaaacagatgaataacgttctgtcatagtttccagagcagcacggaagagttacttgtgtccaactcagaaaagggaaggtattggctttgcttcatagtgatgtttggaaacacaagggtttgcatttcacttggaacaggagcagaattacccaggcttgtatctcacaaacgtaatttgagggaaaattatgtgtgtaatatattttattcctatttaaacacacatttgaaatgataggactgcactagtacagtatttgcaagaatacagaagactgctaatcaaaagaatgagtgattttttactgtcttcaatttactgaggttttcatgatagggcggccttgcacctctaagaatgctttggttgtttttacttttcctctgttaagggcctgctttgcccccaaggttaggctgaagctggaaatgcataggtgacacttggagtccccgagttcagcgcccccaagttcttattagagaccccttggatgtgctttgaaagttctccaaatatcaggcattcaaaccaccccctaaaattgcctattaagaataatgggactttagaataatatgaaattcacacataccaatctaggcagattttctaccacaagtgttactggaattgctttgattttttttttctttccttttatgcctttgggcatggattgaaaaagagaaggtttgtggaaagagtggtaaatggaattcagggacatcttagaagggttttaatttcatcttactactcagaagtggggtgaaacccaatccccaattcttgcttttctgtctcatctcagctttgtttcccattccttctgctgatggtggttaaaaaaagactactggcctccgtaaaaagcaatggtgagtttaatgcctctctgtaccctcaactccagcacccacccaaaggcaatacagagatgcccatgtcacaggtagaatcttacaaatttttataatggcagaagcagcaattcacattaaaataatgattaatttgtaatgcacagatttgtcctgttcctcctctgtttcaatcttcctaaaggcttcccttgtcatgctaagtaaaactggcatctttacaatatccttacatcatcttctcctgcctcaccttgcctctctgacctcatgccctgccacttccccccgacacttacttgattattacctcttgtgttaatatttagtctcatcaggcatactctgtattgatatattcaattgtttattgtttataaacaaacttcatgggactaggaactttgctttggtcactactatgtccctaatggccagaatagtgcctattcagtgtcaagttgttgatacttaataaataaacgttcaataagtgaattaaatctctcccactttttattttaatttctgtgtggtggcatcctctagcaatctgaaatgtgtagtcaatctctctacttccccaccccagccacccaacctctccatgcatttttctttattttttgagacaggatctcactctgtcacctaggctggagtgcggtggtgagaccacagctcactgcagcctcaaacttccaggcttaagtgattctcctgccttagcctcctgagtagctgtaactacaggcttgtgccaccatgcttggctagtttttttactttttttttttttttttttgtagagacagggtcttgctatgttgcccaggctggtcttgaactcctggactcaagcaatcctcccaccttgatctccctaagtgctgagattacaggcatgagccaccatacctggcctccccatgcatttagttttgctaaatggaagaaataatgagaagaggaagaggggcagcttctaagagtagcaaccttgaaaactaaatttgcttccaaaggaattcttgaatttgaccactttcttccctcatggctcaggtcccaccacctgtcagctgcccctcactgagagccctgcctccaaccttccactcttccaatccatcctccaaaggctgcaaaaggccatctaaggtggaaatctgtgtgattgctgaggctgatgttcttcacaagccatctggccgttcttgggtccacagtaagtgaatacttgttattagaatgcctgtatgagattggaagctcacgagcatctcagctaatttggttttcaagttaagatggtttattctttttctcctcttcatttcttcttcctaccattatgccctattgagattttattctatgctcaacagtattctaggcctcgaggtagacatcaaaaaaattacctttgaatttcagcatggatataatttgtgatcatacatgtttatgaaaatactacattgccccaaaccagaagcaaccaagagagaggagacagagaaagagacagacacacacagcggaaagacaaagagagaaagaggagagagagacagagagagagagagacagagagagagagagacagagagaggagacagagaaagagacagacacacacagaggaaagagaaagaggagagagacagagagagacagagaaagagagagagatgaaagcttactatacgcctaccttgtaccaggaacccctcaaggtaggtagcattatctccattttatagttgaagaattaggtccagagattaagtctctttcccaaaagcttaggtcttgctccaaatttcttgcagtgtccattataagaaatatataataaagccaagagctttgaaatgtgtacatatatgatttagtgaaaaagagacaacacaaaacagtatttgcacaaataacaccgccatgtaaagtgtggaaggagtttagatggaaacagttcgattttattggattattcatcctcaaaattgcccaagtgcttaacagtgatacaatagttaggttaaaatattgaggaaacaaacttgaaaaaaggtgctaggttttgttctacactgcctagactcagcagaagggagagaatttgtaagcaatggctgaagaaggatttttagaggagaagaagagggtggaagatgtgggaggtacctaaagccagaaagataatgaacagaaaaagatccctcccaggcagcctggctggattcaaggtccctccatccaacaaggactgttctcacttcctagatatggccaggaaaaatgccagccaagtacatttcaagtttctctagggcattccctaactgaagcatgatgctgggactgaacttggcattgctgagtggaaaagtcaccggactggaaatgagaagaccagggtcttggtcccactttggctgccaacaaggttatttccatacaaccttggataggtcacttaccttctttgtcctcacttactccatttgtataatatggaagttgaactgtataatatgttctttccaattctaaccttttatggttactctagtgtaagctctcaaaatatcccaccaagatggctgcaggagtctcctaactggtctctctacctccattcttggcctgtaaattgatctttcctgttgccatagaatgatgagctaataggtagattgcattatctctttctcacaaatgttcagtgactctctattgtataaagtccactggcaacagtcctagcacattaacagcaatcacaaggtccctatataactgccccatggacatcttcagcccagtctcctgcattgcccctcttggttctcaggtcctggtattaaagaacagcttatagtttctgaacatatcacactggcactgatgtttgtgccttggctatttcccttccaggaaatccattctcatttttcttcacctggctctctgtccctcatccttccagtttcggttcagtcttatctcctttaagatgctttcctgaaactttcagattagttcatgagaaaatatgttctctctagcatccttcactgtataattattatttgttgagaagtctgttcctctaccaggcagaatgttccagaaatacagcaactgttcttacttttccatgtagtagtaatgcaaccccagtctcactcccagcagagtctagtacatataacttggtttgtagaaggcaccaaataaatgtttataaaagcgcactctatgtttctctgctatggctacacagacctcctacagattccaacaccttcagcctttagcaagccctcatttgaatacaatcccaaaggtggaacaaggcaagttccatccctatttcttaagtgcactaggcgaactccccataagccctgcaactttagtcttttagtttcggggctggcgggtccaaggcaggctcatggctccccacctctcccactgattaaccagaaatgaaaaggcttcacaatccctgggcccaggttgctgttatgtggggctcgtagtacggaatcgtatctgactccatgagagtatttgaagctttactaaacacccctaacctatcaactcccagctttgtagtcatttccagttggaatgtttttagactgcaaaaagacaggtttgtgaaaagacataaacatctttggtgagaggtgacatacgttttctcctagtgaaagcaagacactcctgtagattctgcagtttttggatactgcacaaaatacatctcttaggcaattaatctcctggcaggctttgagtgaagcaattaccccatgtttttctttgtcattgttcgaaagtttaacagtgcatctatctactttatttgagtctggaaagccaaagcccgccttaaaacctctacagcaaacatacgtaaaaacgtttagtgttcacacatttgattaatatattgacaaattttttcattagaacattaaacccttcactttattcatcttaaatgctttccaggagagtgacttcccccattagaatgactcctagtaactcaatacaaactttgcaagcaagagaccatggaacatggtagtctattgtgctcacattctgtggtgaggcagctgtaactggttatgaaccagtgctggaaatagtatttggagctttcttggcagatttcttacatcgttattcaatatgaactgcaaatcatatgctcatagttatgaaaatgtcagaaactcctagtgttcatgctttgtttgacaaagctattttcgagtagtgttggaaggcagaggcatccagcacttgggatgcagaaggaaagaaccccttcccacccctggcagtttttgagaagttggtaatttgctcctatatgacaagagctcaactctgaactgatggacgtacgtttcacatagtcttgattagtccaggatgtgtgtcagggctactagaggtctggaaggaaatgcaagaaacttgtgcacttcttgctcagtttggtcaaatgagcttcagaccagggtcagcaaactatttgactctgaatcctaggggcagctgagcaatgctccccatggaaggagcaggaaaaaaccgggcctagaaggaaaggagagaatagacagtgaagaaaagaaaaaggggcagatggagacagagagggaaggagaaagggaagaagggagaaaaagaaaggcaaagcttgagatcagtctaatatctaacaataatacaataaatgtgcatgatttaatttataatttaaatttagactttcatcacattcttataagataccccagggcattctcattccacccttttaaaaataatacttgttgtggtaattttgaagaatagaagcacaaagaagggaattaaaatcatctacatccacaaaccacagataattaaggttaatatgtagcatatattctgtacacatacatataaacacacaaattatttttgcaaattggaattatactagacatagttttttctttttaatgtaatatgtattttccacattatgaagtattcttctaaaatattacttttagtgaccacaattacacagttaccattatattcaacttatcattatttataaaaatgttgagataaacatccttgtagatagatccttatatactgctatgattatttttctaggctcaaaacaataagtggaattattttggggtaaaaggtatgcacattttcagggtttttacatgaatttataaatatcttttaagaaaactgttatgacttatatttctaccatcaatggggaagagtatctatttttctgcactcaatgcctacaagtgcctgttaaagtacctgctaggtaaaatcactttaagatcatacctcgttttttatccttagtaaagttaaacatctttttcatatgttcacctttgtaaaacttttgtactagttattacatgaactgtttgtacatttttagcactttttctgtccattctatgtttatattagtattctttattagatgaaaacactgaggttttatgagattaaccaactttcccaagatcacacagctagttaagtggcaaaaatgggattcaaatttgggttttctaagttggcttcatgtcatgccaggcacagtgttcttttctaaattccaagaataatgatgtccttaaatccaacatgtcaaagacaaatccactaaatgccaaaatgaataaaaccccgggaacttacaatagtataacaagacatagtgtccctccatgaggatcaaacattgttttggtctttgattatactcaccaaactatgcttggaatatttgcagagacatagaggtagcctattaaccagttctataatgtgttttatttaaatgatctctggtgtcccttccagagtggcaggcttaaagcaaatctggatgggagaccatgtgaggagagatactgaggaaggaaggggaggcttgctgttgttaatcaagatggtgcatcagttggtagtgtattctactggatcagtgagggaatgtagctatcaaaaacctgagtgacattaggggcacttgtgactaggatgtattctctgaaatgagggaggagccattctttcttccctcttactggtcaaacttcaacttcacccggagcatcaggcaccactgtggacaccagatgtcatcagggctatacatcagtgatcattcattaaaagcaaaaagactaggttggggaagagaactaaaatgatgtcgcaagaggaatcattgaaggagctagagatgtgagcctggagaggagaagattccagggaaatgagaacatcgttcaaatgcttgaaggacagctctgtgtcctctaccagacagatgtgctctttaagcaccttctccagttcctcatctccagtatcctagcatatgggggtcagccagaacacagatatttattggtggcctactgacagcccactcctcccactcttggggccacagcagtggacaaggcagaacgccctgtcttacagagcatgcatcctaagggtttccagtacatgactgctgaaggatcgatgaatacataagtggatgcctcaaagattaaacatcaaaatggggaaccacagaggaacatttggattgagagggtaaaccaatgataccctcagaaatgatggaagaacagtggaaatgccagtccccagaaagctgaagtcaagaggtctgaagagaaagggccaattagttccttcttccccatcctcacatcacatagttacattttaatgaaagttccacctggttaaattgcattgatgactcctactgtttttaggatacagtgtaaattccttaacctgactcataagctagctcacaaattggatcttgactgtatttccagcctcaacatctcgggttcagacaaaacaaagagaatcagatagaaaattcctgcttggagtcaactaaatgcaggctaagtgaggctaaggggagcagccttcaatgaattttactggttccttcaactagcactaattgagcacctggttggtggccaggttgtggcagctggtgcaggttctggtgctcaaagagctcacagtttaaagaggaagaagtagctaaccataatgaaatgccataaggtctactacctggtgagggctgcctctccaagggtagaagtcaggaagaaatggaaggaaaagaggcagaggtagatctattggttcattctgcagatactgagtgcttgctatgagtagccactattttaggtgccagggctcagtggtgtaccaagggctgggcaacagagcagtctgctctggtgcagccaatattggatgcagactctgtggataatataaaaacaataatgagaccaattatgttagtccacttttattaccgttatgcaccggcaattcaaacaatgttgtttaaaatactcttccccgccagggtgcatattcccactgcccagcccttggtacaccactgctgggtctactacattgaacaaaacatcccaaaatccctgccctcatggcagtttacattccgggggagggacagtggtggagacttctagttgtccatcaagatctgctcttctctcccaattttaatagtagaactccttacattaactgaccaccagctggagaccacagctagatatggtcatgtgactatgttctgatcaaggaggtgtttaccttctgatcaaggtgtaccacctctgggtcaggtccttaccaaaataaagaaacaggaggatggaaggaaggaaggaaggaaggaaggaggaaaggaggaaagcaggggaggaggagggagggaggaaggaagaaaggaaggaagggagggacagggaaagaaagagaggagacaggaaggaagggaagggaaagaagaaaagaaagaagatagggctgagcaaaaaaaaaaaaaaaaaaaaaaaaaaaaaaaaaaaaaaaggggtatctccctgactggagtgtggccatgaagagaaatgctgaagaagtcatccagaacaaggtaaacactacaggttgaggctggcagagggataagatagactgaggctggatgttaatgtgaacactgggaacagagatacccttccagctatggagagcctcctctagactggagggaaatccatttctaccttgattaagccattctccatccatccatccacccatccatccatttattacaccaacttagactgaaccctaaataatactgggaggtagactataaacaaataaaggaaatatatagtctggcaggtgttaagtgtatgcaggaaaatgaagtggggtggaggagagtgagtgttgctgggtcaaggaggctgcagtgccattgttaccattagacctacatggtccagtatggtagcaactagccacacgtgcctgcttttgagcatttgaatgtggtgggctcaaactgagatgtgtggtaagtgtaaaatacactctggatttcaaagacttagtaccaaagaaaaaaaaaagagtaaaatatctcattcatatttttatatttattacacattaaaatgaaaatattttggatctttgggttaaaaatagcttattaaaattactttcattcatttttactttttaaaatgtagctcttaaaaactgaagatgacgtatgtggttccactggacaatgctgctttaggctccccgtagcaattcctcactgtgcccccacacagcgctctccatgaacctactgcctcctttgtattgttgactccctaggcctcccccaactccaggctttccatggtcctgttcatgggaaagaatcctgctctctggatattagactttattaataataatcatcatcagccagtaggttcctttaaagactcagcaaagggagttccctacgtggaggcccagtgcacattgcgtctttggagaacagtcgagaaccaccaaaaggttttgcttctcaaaaataacacaccatttcctgactggactgccacaatacacacatttccaccattgaaagttcaccttttcttaaaagtttttatttctagaagacccctttttaagaaagtggcatttgaaaatctctaagtcacagcatccaagagcaagggctttggaatcaaataaaccagagttcaaatcctagctctgccctttcttacccatgtggccttaaataattacttagccatttaagcatccatttcttcatttccaaagtcaggatattatcacctacaccttacatggctgtcctgacctactatggttccacctttaacacatgtgccatggatataggtcagctcagattatagactataggcccccagccatcactttttttttttttttttttttttgagacggagcctcgctctgtcacccaggctggagtgcaatggcgcagtctgggctcactgcaacctccacctcctgggttcaagtgattctcctgcctcagcctcccaagtaactgggattacaggcgcctgccaccacgcctggctaattttcgtatttttagtagagacgaggtttcaccatgttggccaggccagtctggaactgctgacctcatgatctttctgcctcagcctcccaaagtgctgggattacaggcatgagccactgtacctggctgccagccatcacttttaaaaagctgttgagaatcgtgaataaggataaaaaaatacaactatgggggtatatactttcccttccactgcctctcagaaaaattcaactggggggagtgggctgaaaaaggcagtaaaagggggaccacattcccccagaggataaacaataaacgccaaaattcctgttgtgcacgtatagcattctactgggaggccaaggggtcaggattatgtgtgaaaaaaattaattgaaatggctctttaagaagcaagaaaaacaaggcaaccccatcatgtcctcagtgaaatgtccttttcacattggcccttgggttacgccagccagagatgacctgtcaaggtgaggctggctgacacacgatgaagtgtttcattaatactgtcaaaccatgacaacatttatggtccacgtgctggactttcacgtgtcacctagacatgaaatcttttaaaatttccatagcccagaacagttgaaatatcaacagcttttatctatgagtcacatggaggagaaagtgctatatatgcattatctcatttcactctcactgtgacactgggcttgttaactgggtgttgttaactctgatttaccgaggcctaaaaagcctcctcattttccccttgatctgagcatcagaacgagcattaggatcaggtccatctaattctttttttttttttttttttttttttttttgagatggagtctcgctctgtagctcaggctggagtgcagtggcgcaatcttggctcactgctacctctgcctcccgagtcccggttcaagcaattctcctgactcagcctccggagtagctgggattacaggcatgcaccaccatgcccagctaatttttgtatttttagtagagatggggtttcaccgtgttggccaggctggtcttgaactcctgacctcatgatctgcctgcctcggcctcccaaagtgctgggattacaggcgtgagccacagcacccggccaggtccatctaattcttaaccattttgctatactgctaaatacagaaaggccaggcttacaatgtttacatttattatgaattattaatgacttataaactgaatgggatcttgcttgaatgttttaattattattattattttgagacagggtctcatgctgtcacccaggcaggagtgctgtggcacaatcacagctcactgcaaccttgacctactgggcttgggtgatcctcccaccttagcctcccgggtagctgggaccataagtgccaccactaaacccagcaatttttgtgtgttttttctgtagagaaaaggtttcaccatgttgcccaggctggtctcaaatccctgggctcaagtgatctccccgccttgaactcccaaagtgttgggattacaggcatgggccaaggtacccagtccctgttttaattatttgtatgaagacaaaatgcgtgaactgatctccttgactaggaagtagatggtgatcatgtttgtgactgagaatgtcttgtgggagctgcctaatatttgtacaggagaaccagtgtggtgttgtggaaagaggacaaggctggaggaaggcaggcactgtcagcctgatagggtgatgttggggcatttttaaagcctctgtgagtctcagtttactcatcaatgaaatgggaatacttacttccacagtgcctgtatcacagggtttttgtatgataatgcatgtgaaaatgcttttgtgagctacaaaatcctacatgaacacaacagacaaatcaggtgtgtggcatgcagcaggtgatgtgagaaaaaggcaaatactggcagatcaaacttcttacataagctagagtaatttcagaaaatgtgatttttatcattcttcccccgctcactggtttgagagaaaaaaaaatactttttttcttaacccaagccaaattgaaaattgaagcaatgaataacattacaaagtgggctcctgcatacaaagaattttccatatattatctctatttgatcctcaaaatcatgctaagaggaagatatttcaaagatgaggaaaatgaggtcgaagagatcaaataggctttatttgataacttggtgattaattggccagatggggactcaataccaggtctgttatgtcttttcctctttactaagtttcctctgagttgaactcccattctcccacacccctctatcccctgccccaaaaatgtttagcagaagacaaagtaacatcattgaccaatcactggttttcttagtcaatcaggacttggttgaggacatatttattttatagcactacatagagggttcaaaaggcaggttagacttgatttcttccctcaaggagcatgtaacgtttctggagagacaagatataaaatgttgaaataacatttcatatgttatttcatatgagaggccatgtgttaaatcatataccatggaatctaagtgtaacacattcagtgcaggaaaatccaccgtaggctggggtggtcagggataacttcctggagaaggcggaacttgagtttcctctcaaagtcatggcagaatggaagccagggccagatcccgagtcccagccaagtgttgtctcactacacggattggtgccaaagggaagagtagattatacatttaaaacgcccttttcctttcaatatacccagctcttcaagctgctggatgtaattcccagcaagcagaggcaatctgtgaatgtttgttatctaatagattccttcttatgttagttgaaataaccatcacaatatcagtaaaatcatcaaggacaaggcttcagaacaacatattcctttcgtaaaagagctatactttttgaggtaatactcatttaaaaaggggtattcttttatgtggctttcccaagaatgcagcctggcaatttaaaagtccaagtagtaaagcttcccctttggaaacctcctttatatctaacatgtgcacattcgccaggcataatgttaaaaatattgtgacacaaaatcaccgccccatcctttcaagtttgatgcagccagtttaatgttcaatatcactgttcgcagaaatgctttttgatctgaggagatatgagacacagccatcccacagctggaatgtaaggattctatagaagagcatggattaacttgaaagtgcggtggaacgggatggtctcatctcattagtgaccaagagttcacgagaaacttccatttgtttcaacacattgtaaatctgggtccccagtgccaaactctgtatctggcataaagcaagtactcaagagataaatactgaatcaatgaagagctacgatctttcatgatccggcactttataatgcttttagaatccttattctaaccataatcatgttgaccatttattggcaggtgtgtattaagcactttataaatatgatcttatttgttccatacaagaatcatgcagaggcaggtattactcctcccatttaatagatgaggaaactgaggtttagagaatgaagcaatttccccaagttcacatccagttccacacaatgcctaagctcatgctgccaccctctgtttacaatgccgctcaaccttcaggtgcatcaggcaggaatagagatagagcaaaagcagatgataatagcagtattaataaaataaatatatattgagtgcttattctttttaagtgatatatatatatacacatatatatactttatcttatttatttatcgttacaaccataagaggtaagttctatttaccctcttatacagatgagtaaactgaggcatatataagaatttaagaaatgcactttgggaggctagggtgggagaattgcttaaagccagcagttcaagaccagcctgggcaataagacaagacctgtctctacaaaataaataaataaataaataaaaattaaaaattagccaggcatggtggcatgtgcctgtagccccagctcttcgggaggctgaggcaagaggatcccttgagctcaggagttcaaggctgcagtgagctatgattgcaccactgcactccatcctgggcaacagagcaagttataaaaataaaaataaagaaatgtgtccagggtcacctagttagtaaatggtggagcaaggtaccagatgtgaaactgtacatattacttaaaatcacttcaatgaaaaaatcccaacctaactgggcacgtgcctgtagtcccagctactcgggaggctgaggtagggggattgcttgagtccaagaggtagacgctgcagtgagccatgatcgcaccactgcaatccagcctggtgacagagtgagacctcgtctcaaaaacaagcaaacaaacaaccatcttatttttacctattttacctctacttaaccaaaattggactataacaatataaaaggcaaacaagtcttgttaactgactattccagttaatggaggatttatcacatatctgatgatgtcctgagccttggcttacctccctgtgtaaagaggaggtgggacaagataaggctgattcatggtccctgctaggaatgcacttggatggccctatgattccctcatcgttcaccacttctcagtggtactgaaaggcagttgatacccgtttgaattgtgtcaatcagaaaaggcaatgtgccgggtttgttaatgccaacctaaacaacttctcagttgttctgtcagcactgtcaataccctgggccctgttgtggagcagaaaaaaaaatgcttaagcatgtctccctcaccctttctttaaaggtgctgcagggctgtggagccggggttctttcagtactacctgtatcaggaagccagctttgttgttcacacctgccctgggcacctttgcatagtcaactactgagtctctctcccatcagtcactcctttagaaactgctctctctcttctaaaattaagcctttgagcttttgcttctcaacatttcatactgatagtatcaaaagggcattaactttctaagaagcgacatattaagctgaagaattccgatggtgtgatttcaatgacctaactgcatgtcagtcatgttgcacgttgagatggcctcaagcagctctaagagggcagcaattgtgcaagaagctgacacttccagcttcagtcatcagcttgggctttctactctctacccctggtaggtgaggctcatcttggccccaagttcaccggtcatggtcccacatatagaaggagttaaaggcagaggcacaattcaggggcagagggagaaaatggactgagttcccatgccaggagtcatgccaagcactttaaaatttatccttttaatccacatatatcaccacgagtaagagtgtttttatcttcattttataaatgggggcagggaggcgattgttaaatgttaaagttgggcctccaacccagatctgtcagattccaaaagaaaaatccttggatctgtttaaactttatgctttcttttttctttctttcttttttttttttttaggacgaaacactggaactctccagaataaattggtacctgggtctcttctgaagtgagctgctcttaggagcttcaaatgagggtctttgaagccacatgaaaattgatgagtggttgtaacatccaagctaccaaatcagacacacttgtaattgttcccaatgtgagttttcaccccaaagttctcttgtctctctccctcatttttcccgagtacatgggggagaaagtcatgatgaggggatgatctgccttccagtttaaaatcataagaatggcttggaaacttaagagcagtgagattctggaccattaacgaccacactaacttgcagcttcctcatctgtacaatggggctaatgactcaacggctatctcttcggcctactgcagaatatagggatggtacctgtgaagccctttgtaaactgcagagtgctatgtctactttcactgattcactctttccatagatatggtgtgcctctttgtgaaatgcacggtgttaggctatttagtgaaaaccaatgaagaaaatacaatctcttcccttaatgtatgcacattcttgaatagaaaagacatttacagaaataactataaaagagtgtagaagagaagaaaacaggcaccagaacaaagagaaacaaaagatgcaggttgaggggcacctgagagcagggttaagtgaggggattcagaaaaacggaagaaagtagcttaggtaagagcagtctggaagattaaatctatggaaggtggcaactgtttcattaaattatgcattctttcatctattaccaatttatcacatgcttattatgtactggctactgtgcaaattagtgcggcaatgtggagaggtgaaatagggaatgctggcaggctgtccatagggaaatgtccaatgggaggctggaaatgcaggtcttgcattcgggaaaagagtcagggttggctgataaatttcagtcatccttatagaactgccagttgaacctataagaattgatgagcacactgggtatgcaggtgagattagatggtgagggaaggaggaagggcagggacagaaacttgtgggggaatccacaaatatgaggttgaaagaggaagagaagtcaacaaagcacactaaaaagagtctcaaagaggtgggaaaaaagggtgaaagatgctatgaaagggtaaccagctgcatcctattctacaaagttcactggtgactgagaagaaaccactgggcgtatcaattaagacactgttagggctctatgagtcagcatacagatctcccaagtccaggacaagttactacaatcatctgattcgtggccactagtaatcatgatagaatgcctgggttggaattctaggcctgccacttactagctatgtgacttggacaagttaactttttttttctgtgccccagttggagataatacctttactgcttcatgtggttatgatgaggatctgataaacatcacaatagcacttacccaatagtacacacacaatagcacatcacaatagcactcacccacaatggaacttagaacaattattgatatatgatcagctctcagtatgtgtaaactatgacatgcaggccaattcacctagaaaggcctattttcaaaagctcatgtcctctgaattgaggaaccacagatcagatcagcctcttcaaccccccgcgaggctcccattcatgtaagacacccatggctttgtaatggcacccaacgctctgggctggcatgaaaattgtgtgactcacatcatgtgcctccccaagaaggtgaggctgttgctgcaaagctgactagtttgtggaatgtaaggacttttcattgattagctttggggaaaccactgtaagcaagtcttaaacatcatcacatttgattggtttataagttgtggcaagtgaacccaggtctaacacttaggaacaagggagaaaaaaaggaagattttgttacttgtaatcagctttttactccacagattttctgtgagttgggttcaaaacatttaattccactttttccctctatgtggcacctcatttgttaccaggattttacagacggagacacagaaatgtgaaatgaatagcccaaggctatcttctcccactactcccagccctaccctccagtgtgtaattgtggagccacggacaatgtaccaaggcagcaaacatcactggcttgaagatgactagtagctgtggtcagcttgctggggacccatgctcctgagggttcttaagaagtgtgggaggactcctaaagctgttgttgaaatcagtttagattatgggactaggaacccgaggaagctaaatttactttacaagtcaactggattagcactaaagtaattttccttgtgtaaacccaattttaggtaatggatgagctaaacttggagcagggggctgagacacagatttcctgtgctgtcgagctattgcagatctcagcagataacaaagctattatcctggcagaaatggaagcatcctcaaatcctgtcagatggcagcatggacaaaaattacaagcaaatgtatttttaagctgatgcactttcttaagtctggctcctaaaagcaaaacatgctcttctaggagaagttttagtaaaaacataagaatgctgctggtaaggaaatctctaggtgatgccagggactgacaacagaggatttctgatagaagaaagagacaaggatttggaccaagtttctgaatggaatcattgtactttctttttttttttcttccttctccctccccgcttcacccccgacctctagagtttcttagcaggcattttggaggaaaagatttggatcagaaattcagaaattacctgggctcacaaatatatggtatgaaagtattttttaaatggtttcaagttaaaggtctttactccactgctcctaacagagtcccttaatttcctacctactctcagcccctccagcaccatcctgcattctgcttccaagatacatgagctttctgaagagctggtgagaatgctgaaacttcctggccttggtttcccatctggtaaaatgaggaagaccaaagcttaactctcacaaggaatatgcaggtaatgaacactgtatgatttaagagacccttgtgatatattgagtactaactttgaaattacaaacagaaacaaccctcctttgttatcctgttttttaggcaggaagcaagcagaagaaagatgaggatgggaattagatggcttgcgttttaatctcagctgtgatacttaccagctgcctgtcctcagggttcaatgttcaattgacctgaatgcaaaacccagctctatatctgataggctgtgtgaccttagaaaagttacttgctgcctcttaccttcagattcctcatcatcaaatggagaaggaagtacttgcctctagtggtcttccttcccactttacaatacacttatgcacataaaatctagttaaaacagacaatatgaataaaagaataatttgattttagaataggcataggagaaaagtgagctgccttcattgctttgaatattagaaggatttatccactgattctaactgcacttgttcatcaactccacgaatatttgattaagagttatgttcctattgtacatatggacaatacctggcctcatggaacagatagtgctatgtgatatggacaaagacagggagactgagtgtgcagaggaggtcatgtgacctttactggagggatatagcaaaggcttcctagaggaagtgatgtctaaattgacagggttagctctggtctgagttgtgtctgttggtagggctaattaataagacattcggacatcagaagcccccaaaagacaacaaattcctgcccatcccaccctaccatataataaaaggaaggcaggagggcctgaatgaggtaactcacacctataatcccagcactttggaaggcagagcggaggactgcttgagcccacgagtttgagaccagtctaggcaacaaagtgagaccctgttctctacaaaaaaatacaaaaattagctgggcatgctggtgtgtgtctgtagtccaagctacttgggaggctgatgcacgaggattggttgaacctgggaggttgaggtcgcagtgagccgagattgtgatttttcagaaaggataagtaactttgcctacagggctcttctatagcacaaggaagattctatgtgtgaaagtgctatctaggcactgtgcaccacatcataagtgcaggaatggagctcagggcttgagtcaaaaagatgtgatttgagcccaaactctgccacctgctcagagtgctcagaaaataccctggagaagttacttatcctttctgaacctcattttcttcacttataattccagctacagcagcctcataagactgtgaagattaaaattaataggaaatgtgtaatttttaagtaaactttaatgtaagctgttttcatgccaatcttgtgcatcggagctgatctataaggtctagaagatttggctacctctgctctgataaaactcagaacaatagttgatgccatgtctctcaaactggggtgtctgtaagacacacctagaggatggactaaagatgcagattgccaggaaccacccccagagatctaagccgggggtttgtatcagaagtacctgtggagcttcttttgcattccgattcctggcccaagctctagagactgtgattcagtagctctggggtgtgtccaagatacctgtggccctttaaataaatcattttccctgggttttctggagatttggatttagtaggactaggacagggtcctaaacattatttttaacaatcccccaagggatgcttacgaccctgtaagggtgacccatataacagaagcttgttgaaacttgttgccaaatgactttcttctgtatctctctacacataatctccagaatacagaatgtccctttgagacttcatctctctgacttttccattttagactgtcattgctgaacactcttttgctaactttttgttgtagaatgttgtattggtgtgtgtgtgtgttatgtgatgggtggagtggaggctcactcaacctgacttgcctaggcactgggagccccatagtgattcccacggccagctctgcccttgtcacttaactctttatcccagaagtggagtgttgaatacacccagcaatttgaatgttctggttaattgagatttttaaagaccacagtgacttcacattttgtgtcctagcacttaaagctaaacagtgattttttttttttttttttttttttttttttttttttttagatggagtctcactctgtcgcccatgctggagtaaagtggtgtgatctcggctcactgcaacctctgcctcccaggttcaagtgattatcctggcttagcctccctagtagctgggattacaggcatgtaccaccatgcctggctaatttttgtatttttagtagagatggggtttcaccatgttggctaggctggtcttgaactcctgacctcaggccatccacccaccttggtctcccaaagtgctgagattacaggcatgagccaccatgcccagcctaaacagtgatttaaacacacacacacacacacacacacacacacacacacacaacaagaaaacaaaaaaatccagatgttaaaaatatgctgcccagatcaagaccaaaatttatacatccatataaaataattaaacatgtcatttattcaccagtaaaatgattatgatttaatgcagagccaaactctgaccaccgatgctgaatatttatggctggctccctcagaacacagaggtagctgcagaaatatgctcttattctaccctaccttcacttgatgaatgattattttacttagagtgagtgagactgaatttgaaaatacgtcagaggtgaggcccagtaaaattctatttataaataggggttattgtaatcagctctaagtgggcttaaaatagaaatctaaaaagtgaattgttaaaaaaaaaaaccaatacaatctttactaatcagaaaagcactcaatttctggcactttaatgtgcattctgaaaatctattaacaaagcttgacttaaaaaaaagacccctagttcccttatttaaacttgtgaaaagaaagaaaaaaacacaaaggtgaaacataataggtactgcataatgatcacaaggatggaacagcaaagacgatgaaaaaggaatttatgatgattaccctgtgaaaactctctgaagcacataaagctttttaatcacctaaactagctatcattgctcataataattctcacatttgtatagcacttgacagagagctttgtggttaagagagtctgaggcttagagccagacattctaagttcaaatgctggctctgctacttactgaccacctgcactcaagtaaattacacaacctctcagtgcctcacttttgtcgtctgcaaaatgggggcaacaactactgaaaaggttattctaaaaattaaatgagataatacgtgtagagcacttaatataacgcccagtacataacacacataataaattgtacctctgactattattattactctatgatcatttcaacaatcatgtgaggaaagtgttatcatccttgttttacagatgaggaaaccgaagctcttggggtaacacgacttgtgaaactgcatgctactcctcagtggcagggtggggactctggacagaggaactggcaaggtcttctagacctttgacgtgcataaactggcaggtttacagaataacgaggaaaacaaagtgaaacaaaagactgtacccgtgtgctaagaatttattacccgcacatcaaaaaacttatccatcacgatcaagctggcttcatccctgggatgcaaagctggctcagcatatgcaaatcaataaacataatccgtcacataaacagaaccaaagacaaaaaccacatggttatctcagtagatgcagaaaaggcctttgataaaattcaacatcccttcatgttaaaaactcaataaactagatattgatggaacatatctcaaaataaaagagctgtttatgacaaacccacagccaatatcatattgaatgggcaaaagctggaagcattccctttgaatactagtacaaggtaaggatgccctcttctcaccactctattcaacatagtattgaagttttggccagggcaatcgggcaagagaaagacaaaaagcatattctaataggaagagagagagtcaaattgtctctatttgcagacaacatgattgtatatttagaaaaccccatcatctcaccccaaaaactccttaagctggtgagcaacttcagcaaagtctcaggatacaaaatcaatgtgctaaaatcacaagcattcctttacaccaacaatagacaagcagggagccaaatcatgaatgaagtcccattcacaattgctacaaagagaataaaatacctaggaatacagctaacaagggatgtgaaggaccttttcaaggagaactacaaactactgctcaaggaaataagagaggacacaaacaaatggaaaaacattccatcctcatggataggaagaatcaatatcatgaaaatggccatactgtccaacgtaatttatagattcaatgctatcctcatcaagctaccattgacgttcttcacagaattagaaaaaaaactactttaaatttcatatggaatcaaagaagaccctgtatagctaagacaagcctaagcaaaaagaacaaagctggaggcatcaagctacctgacttcaaactatactacaggctacagtaaccaaaacagcatggtactggtaccaaaacaaacatatagaccaatggaacagaacagagacctcagaaataacaccacacatctaaaaccatctgatctttgacaaacctgacaaaaacaagcgatcgggaaatgatctcctattcattaaatgtttctgggaaaactgtctagccacgtgcagaaaactgaaactggatcacccttccttataccttatacaaaaattaacttaggatggattaaagacttaaatgtaaagccccaaaccataaaaaccctagaagaaaacctaggcaataccattcaggacataggcatgggcaaagacttcataatgaaaacgccaaaagcaattgcagcaaaagccataattgacaaatgggatgtaattaaactaaagagcttctgcacagcaaaagaagctatcatcagagtgaacaggcaacctacagaatgggagaaaaattttgcgatctatccatccaacaaaggtctaatatccagcatctataaggaacttaaacaaattgacaagaaaaaaataaccccatcaaaaagtgggtgaaaaatatgaacagacacttctcaaaagaagacatttacatggccaagaaacatgaaaaaagctcaatatcactgatcattagagaaatgcaaatcaaaatcacaatgagataccatctcacaccagtcagaatggcgattattaaaaagtcaagaaacaatagatgctagtgaggttgtggagaaataggaacacttttatactgttaatgggaacgtaaattagttcaaccattgtggaagacagtacagcaattcctcaaggacctagaaccagaaataacatttgacccagcagccccattactgggtatatgcccaaaggaatataaaatattctactataaagacacatgcacacatatgtttattgcagcactatttacaatagcaaagacatggaactaacccaaatgcccatcaatgatagactggataaagaaaatgtggtacatatacaccatggaatactatgcagccataaaaaggaatgagatcatgccctttgcagggtcatggatgaagctggaagccatcattctcagcaaactatcacaagaacagaaaaccaaacaccacatgttctcactcataagtggcagctgaaccatgataacacatggacacagggaggggaacagcacacaccagggcctattgaagggtgggggtgaggggagggaacttagaggacgggtcaataggtgcagcaaaccaccatggcacatgtatgcctgtgtaacaaatctgcgtgttctatacatgtatcccggaacttaaagtaaaataaaaaaaaaaaagaatttattacccatgaggggacaggatgtatatgacttcatgctatattgattagtagaggactgggcacacttgtgattttcctttggactcatcagcatcctccttgcaaagtcctgtcacacatggctttaagtaaaaataataatgataataaattaaaaaccacctacaagaggacagctgagtgtggtagagacagctgcccacagcacctagggtgtggataagaaccctgactcttctatgtactagttttaggatcttgaacaagttgcttcacccctctaagcctgagtttcttcatctataataggggataataatagtaaagatgttttaagaaatgtcctaagggtaatataagataacatagatatatagcctagtgcagagtttctcaatctcagcgctattgacgtttggggctggagagttgtttgttggagcgagctggcctgtgcactgtacgatatttagcagcatctctggccttaacctactagatgctcatataatacctttccagttgtgataaccaaaaatgtttgtagacattgcaaagtgttccctggaaggcaaaatccccctcactagagaactgctgaccttgcccaaagcctggcacaaatgggtggtcaatgaatgttaattctttccctccttttagatagaaaccttttttttttaaggtgaagtgagacacaactaacttggagtcatgttaattcagataatgggagaactgaaatctatattttcagtaatacagaaaaattaacagtgtccacagttatttagagaacactgtgtattcacttatgaaaacatactacttataaggactcatttgaaagtcattcacattcagttaatatactaagttctcaaagcctcagaaaacacctttaaatcaccaaccatttcaggcaaattttaattgataattgcagttaaatatattgaaatggcaattatatattttttaagaaacaaagcaactatttctgactttgtcctctactgcagattaactttccctttaaataagcagcttaatgaagttttgtttcactcacatatctagaggatattttataaatgttgcattgagattttctagttccttacttttttttttttgcatttgaacttttttttaaattttattattattatactttaagttttagggtacatgtgcacaacgtgccatccccatcaagctaccaatgactttcttcacagaattggaaaatactactttaaagttcatatggaaccaaaaaagagcccacatcgccaagtcagtccttactaacttcttaagcaggaaattcttttccatagcgaacctaacatcttcctgctgcttttttagcctgtttcctattgttcaaacttcagtggaaaatgagaccagatgttcataagaagagcctcattcttgtgtacctggagtttgtaagtaacaccaggcctggcctgggacttcctcatctggaccaatgattctcaacaggggggtgattgtcatcccaggggacagctggcgctgtctggagacacttttggttgtcgaaattggggagaaaggggttgctggcatccagtgcgtggaggccagggatgctgctaagcagcctgtaatacacagggcagcccctacaacaaggaattattatccaggttcaagtgtcaaggttaaaaaaatcctgccctagaccatggctcggagatgaattgagcagattaacaatgaaggaactgttttaaaaaagcgaaggcgatcaaaccctacttgtctggctttgagatagatacctgttgcattcttcaggaagatttttctaagcccacctttgtgcatattcccatcacagcacttgtatcaccagcacaatgctggcatacagtggacatttataaaagacaggtgaataaaagcacagctatgaggcccaacaatgaatctccagggttccttaacctccctctctggacacatcaatgtaagctctgagggactgagagggacttctctttgtgagaagaaaggaagtgggtgtgaaggagctgggtttgcttgtctcacccttccactgtctacaccaggagttgaagtttattttccctctttgcctcacactgacagggatagaggcaatagatttggtttcatttaccatttcacttaatcgcctgaaatgtaaaaaccgcacaaacagatctgattccatactttccacgctccttcttgtggtgctgctaagcggagctgttaaaacaaacaggagaaatgtggaggtcagggttctgctacctacttctagtctacttagctattggtgcctctgtctctcattctctccagacctctccccagccctatttgcacctcttgagagcaggaccttctttttctcatcacctgaatacaggaagtgttatagttattaatggggaccagctcttaatgtttgaccaataactatatagcatacacctaaaagcaggagtctgtaacaagttgaaaggagatgacaattgatcttaaagcattacccaagcaatttctaagatgcctttttattccttgattctgccaaacatgattctgtcacaaagcttttaggttagctgtcccgtttgcctggaattatctgcctctctctcagataaacgtatggctcactctctcacttcattcaagcctttgcccaaatgccaccttatcggagaggcctcctctaatcaacccatgtaaagtagcaacctctaccacatcactctctttctactcattgtgatttctgtctcttcttaagcatccttgggttccccctcaagaatgtaagctccacaagcaatagagcagaatttgtgcctgtttcactgtcatatccttcgttcttagaacaggagctggctcacagtaggtgctcagtaaatatctgtgggctgaaggaaaatctcagggcccttcttcgtcaggagcttgtaccattatgtctctacctcctccccaacccaccacgcatgatgggttatttagtgcattagttaatccctcctctcttaatcaattccacatgtccatatctggttattacttagtgtttatcaaaacagcttaactatgggctcccaaagactccttaggaatgagacaggaccatggtgaacagagactcccctgttccctaccccgtggcactattagcctctccacggcctcaggcatggagtcccttgatgtcccagtttaaggtttttactctactgtgggcataaaactcttccctgtttactttctgcacagagcagctcaacggcttttttagaaccattgtagaaggtaaaagtaaaaatttctacccataaaaccatgtaaaataccctcatgatttcatctgtgaccctgaacctttctttttctccaaatcccttttatttttgtaaaagaatgcactacgtgccagcatctggcttgtaaaaataaatacagtgactggctttcccaagtaacttggcctaatcatccagtgctcctgaaaagacccgtctcctgagatgcagcaatcttatgaacgatctattccatggtccaggcacagagggggcacttacatgggttgaattacacaccccagagtatctgcatttagaatgaggactaactcttgactcctatagaattagatgttttcctgtggtgggtagattgctaatgcttgatattcccttaaaacacatttgttacgactcagctatgtgtaggcttgatcatttgagggcaggcactagtaggggtttgatatattcccagatgagttttacatcttttacttaaaaacaaaatgaaggcttggagtatttatcaaaattaagtgatgctgatataaagtaaatagatatcactatctttaaatcaaggtatcaattattaacatttggggatattactgataggcttattttgtttgcttatttcttgagacaaggtctttctctgtcacctaggctggagtgcagtggtgtgatcacagctcactgcagcctcaacctcctgggttcaagcgatcctcccacctgtgcctcctgagtagctgggactatatgaacacactgctatgcctagcttattttttattttttatttttagtagagatgaggtcttgccatgttgcccaggctggtctcaaactcctggtctcaagctatccttccagctcagctttccaaagtgctgggattacagacacgagccaccacacatggtcaacttttttttaaaaaaaataccaaatcaataaagtcaactgaattgaatttaactcaacatctattgtgtatgatttgtaatatttttaaatttttccaaaattttaaaatagccagttagctgaaaaataaactcaactttttgagacagagtctcactctgttgcccaggctggactgcagtggtgtgatcttggctcactgcaacctccacctcctgggtttaagcaattctcctgcctcagcctcctgagtagctgggactacaggcacgcgccaccacgtccagctaatttttgtattttttagtagagatgggttttcaccatattggccagctggtcttggactcttgaccttgtgatccacctgcctcggcctcccaaagtgctgggattacaggcgtgagccactgcacccggcctatttgatctttattttcaacaataaacccacaaacttagttaagcaaaatgagcatgtgttacttgaaattttaattattttacaaataactgttaactaaatttactgtcggaaaaagacattactcaatctgcaaactttaaagcattaggtcaggcaactaatttatttttatcattatttctttatttacagccaactagaaaatataaacattttatttttgcttttatagtttccatttggaacacaaatgctctggagcagaatgttcctctggcggcctctgatgagttcagatgctccgatgacttttgttatccttctcacaccaccgtgacaagtataatagcaggtggcattgactgagcacttagcagctattcatatttactgagggcttcctatggaccaggcactgtgctttgcaacaaaccagcatattggaaggatcgccagaactgaacacagatttaacatatcaatctgtggggctttggcaagattcttcaccactctgaggctcaattgcctgatccctgatgtggaggtagtattaacagtcttgcctgcctcggggagttgtttgtgatgacatgcactgtgagcaggatatggctccatggtgggagtatacgctaatgtgtaagattacaggttcactcctcagcagccccactttataatcccagaagaaggcctgcgagaacacaatctctgcttcacttcctggtgtatctccagcactggggcccgccagtaaacatttcctgatgacatgaataacatgtgtgaaagtgctttatgaactgtaaaacagggcaaaattccattatattattgataacattaaatttccttcagcaacttatttcacccatagccccgatatttatttttcatcattgttggggcaactatttatttagtactgagaaaattatttcaggctgatgaagtcctgaagtctaaaaggatctatttcagttctttatcaatatcacagagctgattctgccccacagtcagctgggatgaaagaagaggcctgtagtaccttggggaacagtaatcccctctggctggactatgcaggactgatcctgaagaatcccaaagccctggaaccactataaacagggaggtgtgactgacaactgtgacaacatgggacaaattacacagactcataccaaagccaggtctgcacctagcaaagtgctttaagttctgggctgcactggagccctagtttgtgcttaagcttagtttgcctgagaattctggcatgtggaggggcagcagaggtgagccagtgagagtcttaagagagaccgcggaacctccaagaccagacctcacactaggggccaagtcagaaacatgcttttctatttgctgcaagcacaaatgaagaccttgtggtacctgaactgcacagcccgggccccttcttccccatttcagagggggtttgggactgagttggcagggagcctacctctgggtggggactcagtgcatctaaaagcacaaatacttgtgataagggtctttcaccctcacttctcactcacagcacaagcctccagatccagtaaatcaggggctttcactttatttcatcactgccctggagtctcctcaaattacctggaacgaatttgaaagggctgaagttcctgtcgagtggcagaaatattgatttgtgacaagcacatgatccaggctgagggttaaatataggggagtgtgaggcagatgctaagtcttacagatgagtagcaattgtgtgtaaattgacggagaacgcagccttttgcataaatttgtccatggactagcacttactattcagcaactgccaatccttcatctctcaaatccttcaatctctgaaacaaaacccacctaaattctcaaattgtccaccacagctcaccctccagaggttctggagcttgaggaacatgacagctgggtttaggaaaaccacttttcactgaatgagaacactgggtttggaaatctggcttccagtcctggctctgccataaccagctccagaaatgtaggcaatttgcttcaccttattctttttttttcccttggtaaaatggaaataattatacctaggacaaaataactttgttctaggtaaagaaagcattgtctcaaggccttatatatatatatactatatgaaatatgtatatatgtatgtatttcaaaaatgcataaatacaatcttgtctgtgataaacagaataaaggcccctaaaaatgtgaatgtcctaatccccagagcatttgaatatgttacatggcaagtgggaattaaggctgcagatggcattaagatcagtaatcagctgacctcaaaataaggagattctcctgaattttttgggtgggtccagtggaatataaacatcctttaaatatggaggaaagaggcagaaagtcagaatgttacaatgatgcagtgttcagaaggattccactgtctgttgctgactgaatttggaagagggctgctagccaagaaatgcaagtcacctctaaagcctggaaatgacaaaaaaaaaatggattctccccttgagcctccaaaaggaaccttaattttaggccagtgaggcccattttggacttctgactttcaaaactgtaagacagtcaacaagtttgtgctacttttttagagtagccattaaaaaattaatttagcaaatgaggaaactaacataccacccataagactgtaccattgtcatcattgtttacattgtcagaatccttgacatcatcatcattatcatcatcaagactttatttcatggctattattaaaaaaaaaaaaacagatgctggtgaggttgtggagaaaaaaaggaatgcgtatacactgttggtgggagtgtaaattagttcaaccactgtggaagacagtatggtgattcctcaaagacctaaagacagaaataccattagactcagcaattccattactaggtatatacccaaaggaatataaatcattctattataaagacatgtgcatgagtatgttcattacagcactattcacaatagcaaagtcatggaatcaacccaaatacccatcaatgatagactggacaaagaaaatgtggcatgtataatatactccatggaatacaatgcagccataaaaaagaatgagatcatattctttgcagggccatggacggagctggaggccattatccttagcaaaccaatgcaggaacagaaaagcagataccacatgttctcacttgtaagtaggagctaaatgatgagaacacatggacacatggaggagaacaacacacagtggggcctattggagggtggagagtgggaggagggagaggatcaggaaaaataactaatgtatactaggcttaatatctggctgacgaaataatctgtacaacaaaccccatgacacacatttacctatgtaaaaaccctgcacatcctgcacaagtacccctgaaatttaaagtaaaaaattaaaaaaaaaagactttatttcaaatacatcctgggaatgagatttcaagcaatgtataattttgccaaaattttcagaaaccaaatcagatggtatctcatggagtgagtgacaaagggattttatctttaagaatgatatcatattgtttctatgcaaacactgatggtattgttcacattatttatttattttacaaaccctttgttcctagtacaaaagtatacttcagagcaaattattttagaatagtattaagaggtttatttagaatatctttgttaacatagctaaaagatctaaggactaatcttggctctaccaattataaacttcataatttatagcctatcactttacttctttggccacggtctctctttctgtaaaacatttcatgtttgaactagatactcttccttagatcacttccagttttaagaatgttgagtttaatttcttgttttatataatgggagaccatgacctagaggaagtaagttttatgtctaatttctaataattcagatatttttggggtaagcttttacaattgaagtataatatacatacataattctgcacaaatgataactatagaattcaattaatttttgcaaagtgaacacagctctgtaactaccacctaaataaagatatcaaatgttatggcacccaggaacctcccctatgactttcctggtcattcccttcaagaggtaactattattttgatttctatcacaaatgggaattaacatggcattcacccatgttgctgcctgtaactataattcattactttttgttgctgtatattattttgctgtatgaatacatagtaccataattatctatcttattgctagtagaaatttgggctattaccatttggagaccataataacttagatttctcttctcaagttaatgtttgtaaaatataaagcattttgttctatttaattgaacttagtatccctggcttatttattttgaacgttcctattttacattttctgtccagcagggagaagtctaagagacaaaatcaataaggctagagaagattggctttctctggatactgtaccttatccatgtgaacaggagattttatagtgacttgtttcagtataaacaaagaggactggaataactgattgctgaggactccaatcatggcagcactgtatgatatgaatgtaaaataagcatgactgactgcaacaagaaggcagcctgaatctacctgaagaatcctcaggccatccgatttgatgatatagtcagtaggattgtttggtttgctagtaacataaattcaaagcttcaggaaggagactgggcacagcggctcatgcctgtaatcccagcactttgggaggccaaggcgagtggatcatttgaggccagcagttctagaccagcctggccaatatggtgaaacgccgtctctactaaaaatacaaaaatcagctgggcatggtggcacatgcttataatcccatctactcaggaggctgaggcataagaatcgcttgaacccaagaggtggaggttgcagtgagccaagattgtgccactatactccagcctgggtgacagagcaagactctgtctcaaacaaaacaaaacaaaacaaaacaaaacaaaacaaaaacaacaaaacacacacacacaaacaccaaagcttcaggaaaaaaaaggcagactaaattatatggtaagtaggctgtttcattgaactgaaatgcaaaagtaaaccggagatgtaagttgtcacaaga

SEQ ID NO: 106 - DNA, 96765 bp, Homo sapiens
gacttagccaagctctgcattttgagcctgctgactttcatttaaaaggaatgaaaggctgaaaatccaggctgctgtgtctgtagataaaggtcaaaccatgtttgagttcttcactgttgtgtccacctaaataaaactgagtaagtaatgaaaaatgtcttaatatttcttgccttccctttagggagagtcatttcatggaagatgtaatgggagatgcattccaaaatgtcttgaggctcattgctgtctgctggaaacataaaattccataggcttcatgctgcttgctaaaatccagctggcagtgactaaagaaagagagtccttgattaagggcccacagattctggaatttctaaagcacaaatcacttgctttctgattgaggattgtttgcctgggcttgggaaaaaaagatcagcaaccatgtgctactaaacatgggttctcctgctcacctctctcaagaggaggactcctttgtacaatggttagtacagcttactattgtgggtaatcagagccatgtgaaattttagtgccattcctggcatatcacaaatatagtaaattctctctaagtgctagctttgactatcttgctcaccagctattcccagggtggcaaccccaggacccttggatgttgtattagttttctattgctccataacaaattaatgcaaacttagcagcttaaagcaatacacatatatcatcttgcagtttcctgggtcaggaatctggacacagctcagctaggtcctgtgctcagggattcacagtgctacagcctagttgtggaaggttgtattctcatctggaaggtcaactggggaaagagctgcttcaaagctgcctcaggttgttggcagaattcattttgcctaactcagaatcaactgatttgggaccttaatcacatctgctaaaaccctccacctttgccatattatcttggctagaatcaagtcacaggtcctgcccacactcttaagtgggagtcatggggctacactacactctgtcagcacagataacctaaatcctacccagtctgtctcagagacctgtagctttacccccttaacagtcttctgaggccggcctctgttcccagtggtgtcattcaggcccttgtctctcctgaattcctctgatagtcttactgtatctaacccagctaacacattttctgtctgtggactttctagaatgcagcagtgatcatgcaaactctccctaccattccaccatcagcacttttaaatcccttgggactcttcgtggctttcaggacaaagaacaaccttgtttcttagaccatacaaggccccacctcttgaagatcatcacatagccactactctccctctcatctcttacacagcctcgtgcactgtttcttaaaagcctctctgctttctcggatgctgtctgtcctcatccgcctcatacattctattcagaagtcacctccagcctccccagcaggaagtattcgtgacctgccactccctttgtcctgacttagatgccctctgtgcttgctattgctccttgcctcagtgcttagcactctgcactacgttgatggctttgtctgtctccccctgtcttggaggccccttgaggctggatggtgccttccacatccctgtgctcccagcacctggcacacagcctgatgcccatgtgctgagggattatttagacccccatctgccgccatgaatgccttctgaacatgtccagagtgggtgacagcatcaggttagaagtgaattcttcccccaggccttatccatctctatcacgacgactcctactttgcccaatttgaagtggccaagtacagctcatcctgtatttccttctcctattttagtaattgagggcttaacctgaaggcttgctgaagcacttctaagaaacttctcatggtggtggtttctcccctctgcacccatgctaatttacatctgagtggcctcacttttctaagagttctaacattgaccagcttatttgaactccacagttgggtgtgctattgatctgagatacttaatgccattgtggtaagaataatgatggcttttctgttcataatttgtgtccacccagggaagatgtttatgaagttttcccccaccccacatccccctcctaccatcacccagtgctgagagcagaggaggaaggagagaagccaaggtggaggctaccgacctgtgtcccccttgataaaaccaaattacagtaactaaactgcacatgagacaatttgctgatcagatcctacctcttctcccctcatataatgccagtgttctgaattcccctctttgaaagaggagtggaaaggaaaggcccaaatgctcctctgtggtacaccagagactgtggagacccctcaggggaaggagaagcacaccaagcccatgaatgaggaaaagtcaaaataaatcttcccaagagccctgttccattattgcaatgtaccttttctcagacacaaggaaatggaaacaactaaagtgttaccaaaaaatcacttccaaattcccagaaatgaaattcacattacctcaggaagcaaagaatccaataataaaacccaagctttcatggaagattcaggaacgtaaaaggcaatgttctcaaggtaatttcataggtagagactcctaaagagatttgtctcatttgttcattttgaatatcagaactgttacaaaggaagcttgtttttttttgaatgttagaaatttctttattattacttattaagcgccagcttaatgctgcagaaaatttcaaattacccttgataacccactttcttttctcccacccaaattcttgatcaagagtttttcaagtaaagacatgctcttctctcttctgtataaaactttacgaaataaaggcaaaagattgtgtacatcttgatggaaaatgctgcccagggctctggagacggtggctgcccgggctcccttcactgcccaggtcctgaaagactcttattcatgaactgtctcttcacaaagcaagtccaccacttgctgggtttatcattctgagggtcgaaaactttctcacaaagtctcagtccagtctcttgccttagctgttgtaaataggctctcatcacttcatcttcctgtttgtttgcaggtttggcataaattgcgttaagtagaaaaccaggctttccaggaatgggaaaattagtgattcccagtgtatacatttctttctcaccttggcttttggaattgcacttttggagtttcttcagacattcagaaatgtagagagttatatatatcattatatattatcaaggtcctatcagcttcattcttaatttcatagtttttgaagaagatattggccttgaagtaatagatgcttcatccacaatatctgtatcttttgtctctctgggggcaggtcgtttgaattgacttctgataggcaacagtgccttgtttccgatgagtttgatgtcaggatccatgagagaagagtggtaagccagcatcttggcggcgcccgggtttcaacccagaggagcaggatcggaagcattgttaagtacagaggtctttggagttccttatcatctttgtaagtaacccatgagataagggaagcttcatttaaaagaaattacccaaaactatggctgtggcaaagagagcagaaagaaaaaaaaaagagtaaacattaaaaaaagaataaggggccgggcccagtggctcatgcctgtaatcccagcactttgggaggctgaggcaggtgggtcatgaggttaggagatcgagaccatcctgggtaacaaggtgaaaccccgtctctactaaaaatacaaaaaaaattagccaggcttggtgtcacgtgcctgtaatcccagctacttgggaggctgaggcaggagaatcgcttgaacccaggaggcagaggttgcagtgagcagagatcacgccactgcactgcagcctaggagacagagcaagactccgtctcaaaaaaataaaaataataataaaaaaagggtggtctagacactctgtccagttgaatatgagagacgtatgtaagtaattttaaattttctaatagccacataaatgagtgaaattaatggttattttaacctaatatatccaaaagacttcaacgtgtaatcaatataaaaatattgagtttcttttattatactttaagttctagggtacacgtgcacaacgtgcaggtttgttacatatgtatacatgtgccatgttggtgtgctgcacccatcaactcgtcatttacatcagatatatttcctaatgctatccctcccgcctacccccaccccacaacatgccctggtgtgtgatgttccccttcctgtgtccaggtgttctcattgttcaattcccacctatgagtgagaacatgcagtgtttggttttttgtccttgcaatagtttgctgagaatgatggtttccagcttcatccatgtccctacaaaggacatgaactcatccttttttatggctgcatagtattccatggtgtatatgtgccacattttcttaatccagtctatcattgttggacatttgggttggttccaagtctttgctgttgtgaatagtgccacagtaaacatacgtgttcatgtgtctttgtagcagcatgatttataatcctttgggtatatacccagtaatgggatggctgggtcaaatggtatttctagttctagatccttgaggaatcgccacattgtctccacagtggttgaactagtttacagtcccaccaacagtgtaaaactgttcctatttctccacatcctctcccgcacctgttgtttcctgactttgtaatgatcgccattctaactggtgtgagatggtatctcactgtggttttgatttgcatttctctgatggccagtgatgatgagcattttttcacgtgtctgttggctgcataaatgtcttcttttgagaagtttctgttcatatccttcacccactttttgatggggtttctttttcttgtaaatttgtttgagttctttgtagattctggatagtagccctttgtcagatgggtagattgcaaaaattttctcccattctgtaggttgcctgttcactctgatggtagtttcttttgctgtgcagaagctctttagtttaattagatcttatttgtcaattttggcttttgttgccgttgcttttggtgttctggacatgaagtccttgtccatgcctatgtcctgaatggtattgcctaggttttcttctagggtttttatagtttgaggtctaatatttaagtctttaatctatcttgaattaatttttgtataaggtgtaaggaagggatccagtttcagctttctacatatggctggccacttttcccagcacatttattaaatagggaatcctttctccatttcttgtttttgtcaggtttgtcaaagatcagatagttgtagatgtgtggtattatttctgagggctctgttctgttccattggtctatatctctgtttggtaccagtaccatgctgttttggttactgtagccttgtagtatagtttgaagtcaggtagtgtgctgcctccagctttgttcttttggcttaggattgacttagcaatgtgggctcttttttggttccatatgaactttaaagtagttttttccaattctgtgaagagagtcattagtagcttgatggggatggcattgaatctataaattaccttgggcagtatggccattttcatgatattgattcttcctatccatgagcatggaatgttcttccatttgtgtcctcttttattttgttgagcagtggtttgtagttctccttgaagaggtccttcacatcccttgtaagttggattcctaggtattttattgtctttgaagcaattgtgaatgggagttcactcatgatttggctctctgtttgtctgttattggtgtataagaatgcttgtgatttttagaccaataacaggctctgaaattgaggcaataattaatagcctatcaaccaaagaaagtccaggactagaaggattcagagccaaattctaccagaggtacaaggatgagctagtaccattccttctgaaactattccaatcaatagaaaaagagggaatcctccctaactcattttatgaggccagcatcgtcctgataccaaagcctggcagagacacaacaaaaaaaagagaattttataccagtatccctgatgaacattgatgcaaaaatcctcaataaaatactggcaaaccgaatccagcagcacaccaaaaagcttatccaccatgatcacgtggacttcatccctgggatgcaaggctgtttcaatgtaaggcaaatcaataaacgtaatccatcacataaacagaaccaaagacaaaaaccacatctcaatagatgcagaaaaggcttttgacaaaattcagcagcctttcatgctaaaaactctcaaactaggtattgatgggacatatctcaaaataataagagctatttatgacaaacccacagccaatataatactgaatgggcaaaaactggaagcattccctttgaaaactggcacaagacagggatgccatgtctcaccactcctattcaacataatgttggaagttctggccagggcaatcaggcaggagaaagaaataaagggtattcaattaggaaaagaggaagtcaaattgtccctgtttacagatgacatgattgtatatttagaaaaccccatcgtctcagcccagaatctccttaagctgataagcaacttcaacaaagtctcaggatacaaaatattgagatattttacttttcattctaagttttttaatttcagtgtgtatgttttacttagagcacatctcatttcacactggcctcatttaaacagctcaatagtcgcatgtagctagtggctaccatattggacggaataggttggccagactattttatgcacatctgttcccacctaatgaagtgcttcactgtccctgtgtccttgtcagtgtctttcttttggcctggaattctcttcccttagagatcggtctcctttctgcaagattaagttgccctctaagcagaattggttaactggatgcatattctcgcctgctcacagtgatgcaaactaactacctcctccctttgaggcttttttatctgaaataaacgagtaagaactgggctgcttccccagtgcccacactgtcttgccttaattgtcattattgatgtttattttgttttgttttgctgctagtccttctcataaaggctacaagtctgttaaattcaggcatcttagtgcctttttagtagtctttgttaaagaaaagttgttcgatgcacttgttaaagcatgggacagcaaactttattcaggaccatcacaacaggtatcaggaccactgcaatgggatttcacagtgggagagattgggctcaacttcgaatacagcatgggcaagtggaaatttataaccaagaagcaggatgggggtcattggatggaaaattactaagaggaaccatcagaagttaaggagattgtcgccaactcaacctaacagtaggagcaaataatctgtcaacctccccaccccaacctcagtctagcaacatgctgagcacacagcaagctgaggggagatggatggaagctgaaagtcagtgtgtgggtgatgtagtgtttcacccctctgagagcaaactacaggtgctcattctttaacctgtgaagtggagaaagcaatgtaataagagcacatggtagagtccctccaaaagttttcccatcagatgagctttctaagtcatagactcccactgcctaagtggagaaaaattcataccctattttctcccagcctagtgctcccttcactatcctgtgccttcctccaagcctgcaatctgtgccaggtgattcatctcccacttggcccaaggatggcctttgtgcagcacatcaactgagaagctgggctcgtattcaagccagtgagtcatccctgagcattgatcaggttggggcagggaaccaagggttggtgggcttttccctagataggaaactcatgaggaaatagccttcatgacttcagactcagttgcagagtgaagttggtattcattcattcaacaaagggtttttcaaacacctgctatctggtattgggcatattaaggtgaaaaatccagcaagcctctggggtcatggagtttgctgggaattatggtggcaaaaaggaaaaggaagaccaagaaagcctaaagctttgtttccatctataatttcgcctctctgagccatttgcccagtgaggggcttggactaaacaacctctagaatctattggtctgtgtctctgtggtctatgtcttctttcatcgtgtcccacactagatccctgggaatccagatggaaagaaggaaggaaattagtatttgttgagtgcctacatgccaggcattaaacagtgcatattagctcattaaatcttcacaatccagtgaggatgttcctttagttttggggtgagggacattaagggaatgggttctcaagacaagctgcctgagttctggcctgaggctgcccgctgacctgcgtgacctgagttcttgactcctctgggccttagttccctcctgtatgacagaaagtcatggattttgacgagggctgaagtcgattaaacaaaggcagtaaacgtaatgccggcacataataaacactcaatccctcagtcttttttaagtctagcagcattttctttattcacatcgtaagccatgtttgaaaaacgagaaaatcccaaactattggagcattacagacaggcgatttagcatattgagaaagcccaatttgagttttgatatcagaaaatctggtttggagtcttagctctaatacttccaagaggtgacccagtgagtcacttaaaatgttttccctgtaccagtgtctactcctcagggttgttgtgaggattcaatgagaatgatgtacctggcactctacaggagctcaacaatagctatttatcttacctcaaatagaaacccatttacaatagttaagtgaaaaggacatcatttcgagctgctgctcagaacccaatggaggcgaattcagctgggaaaggatactggaaaggctattgctaagacagaaaaactcgacctcatccaagagcagcgagacaccctaccctcaacccccaggttttgtcactgggccctgtgtgagtggcagcaaagatggcagagttgtgaaggtgccgtgggcatttttggaatgactcaagaacatctttgactcagcacgggcaacagccagatggaccttgtgggtgtgaacctcccgagcatttggagcggaggctggagaagctacccagggaaccccagcccccagggccattgtgcaaacccgcgtgggcactgccggagacacacactctgcctgcttcagcgctcctctccccgggccagggctgccagctcatcctgccctgcctggctggggtggcagaaggtgaatcccaaaacaggccactggctcctctcattttctactcctttctcttttgtcatttattagttttagttttaattttcaaagatgatgcaagctattgatgagtatacatttattgcaaaagaaaatcggataatatagaaatatagtcatgcatcacttaacaatgtagatacagtctgagaaatgcttctttatgtgattctgtcatgtgaacatcgtggagaacttacccaaacctagctactataacctagatcgtataaccatatgatgcagcctattgctcctgggctacatacctgtacggcatgttactgtactgaattctgtaacacagcattaagtatgtgtgtatctatcaactctaaacgtagaaaaggtgcagtaataccttaaaaataaggtatgttgtatgtgcagtctgtcctcaaccgaaatgttatcactatgcaatgcttgactgtctatggagtgagggtcctccatgcattgctgcctttcataagcccagtctggactgcccagcagagtcacggttatcaccagagtgtccacctccttgctcgtcttgaggtcttatactttgcaccaagctgccttggtcacctgtttaatgattttaggactgaattgtttcagaagggaaagagcatcataattttctgacacatatttaagcatatttttctatcaacatgtaacattttggtcaagtgccactagtttgaggaattctttttcaactggatttaaagaggctctgaaggccagcagatgcagttttgctgcacaacttaaagaacttccttgatcttctaacaacacaatattcaaccaagaaataatgataatatcacttactccagaagactcttgtgagggttaaaagagggaacagatgtcagcaactacaatgcctggcacaggtgaagcctaatattagttctggttattttattagaatctgttgttggccttacagtagaactctcagtaattttttaccgtattttcatgttttatttttttatttttttatttttgagatggagtttcgctcttgtcgtccaggccaaagtgcagtggcgtgatctcgactcactgcaacctccacctcacaagttctctcttcttagctcacctccaccctggggtcccctctttcttcctgcagcccccagaacaagccgacaaccaacctgccctcagataactccccatcatgtcatcagaagagacatgcactcaggtggtggtgcacaggcttagggggcaggcgggaagtctcctggccctaggaaaagtttccttcacaaagcacctgctgtggtaggtgctttgctaaagcacacagtctaaatgaactagtttaccccttactatgtaataatgagtaggttggcaccctccccagaagagtaaacagaagcctgggagctccatgacctgcccaaaccacacggccaggatctaatcctgggccagcctgactcgaaaacccgagtcatgtcagtgctaactgtgaccagaggactgcttgcatcagaatatgtggacatgcttgttaaaaaggcagattcctgggcctctccacagacccactgagtcaggacctctggggcagggcctggggatgtgcatttatcacaccttcctggtgactctgaaacataccaacatctgagaatccctgccctgtgctgtactgcctgcctgtgcactgaaccagggggacccagcagaagacagctaggagaaggggaagttgttccagaaggatcagaatctgtcaacacctgtttattaggaagatctagtggcgtttttgggaaccaaaggaacaatgaaggtccctgaggacacccccactataggccatgctagaggcctggtgccctgcacacatttctagctcctttcaccagttccaagaaaagacagtgttctgagagggcacgtacattcacagaagcaacaaggcagcaccagctgtggcccactggactatcttggcttcccaccctgactcaagggctgggcatccctgatggccctgtgcaccccacccccatgagtgtagcccaccctgaactggggctgagtgctgccaatgtggttggccctctgatagggtttggctgtgtccctacccaaatctcaacttgaattgtatctcccagaattcccaggtgttgtgagagggacccagcagagataattgaatcatgggggctggtctttcctgtgctattctcgtgatagtgagtaagtctcacgagaactggtgggtttatcaggggttttcgcttttgcttcttccttatcgtctcttgccactgccatgtaagaactgccttttgccctctgccatgattgtgagacctcccagctatgatggactgtaagtaaaattaaacctccttttcttcccagtcttgggtatgtatcagcagcgtgaaaacggactaatacacatccttagttggaagggagccagaggggtcagaaacatcctttatggtggagggggcactttatgttggttgtctaagtgagtttgggctgctagaacatgaacaccacagactgggtgacttaacagaaatgtattcctcacagtatgaagtctgggaagtctaagatcaaagtgctggctgatttggttgttggtgagagctcacttcctggtttgtggagggatgccttctcacagtatcctcacgtgactgagggaaagctagctcactccctggctgctccttaaaagacactcatcccattcatgagggctctaccctcatgatctaattaccccccaaaggttccacctctagacactatcacattggggattacagcttcaaaatataaattttggtgagacacatacatttggtccatagcactgacgtcgtctcattttgtagtccaatagcaggaaaaagagggtcaattatccccactttatagatgaggaagatgagttctgagacagggtacggaggtagagtagagggggaaagaagctagatgaagggcgtcatatcccctaatttgtcctgaggtagggagggggagagctggtagctgtcacatgagtggtcactatatagacaaatagtggggcccacttccagggcaggactcagaagcactagtggagggtccagtccagagaagggactccacaaatgatgccgctgtaattattgtctgatcatctattcatcacacattttctgagtacatcctctgtggtgagcactactcatatgttctttatcatcctcatggacatgacaccccacttggcctgcggtggctggagacctggggaggagtcatatcacagcttttagacccactctgacatcgaggttaaatgcaactttagggccagcaagtacaagccttattctgccacttactagctgcagggcctggggtggcacttggcctcccaagggaaggtgctcttttccccattttacaattgagaggacaagatatgagaggtgaaaatacagacctccctgactagaattcattctcccaaccaccatgcacactagtgtttcccagaggtggtcctgcaggcttcagaatcttgtgaggtgtttggagagtgattcctgacccctcctccgactcagtaaatcttgacagtgaggccccaaaatatgaattcttcacaagctctgaaggtgattcttatgtgtgttggggcttgagaattggctctcctgcctcctcatttccagtctttaaacagggatctgcacagcagcaggcagcagaagtaggcagcgctctggaaatacagttggcaaaagctctctcccttaaaactaacagggagagagctaactccatgactggcatgacatctgtgaacaaaggaagtgacagggccaccaagaactgctgtgggccagtgagagcaacagaagaccaggtcctagccttccctgctgagaactttacccattgcctagtgagaaggaactggagatgccatcagagctgcatcgtagtaatgctggtagatttcaatttttacaatttatatttgttatgaatgtattcaccattccttagagtatgtttaattatcctcagtctttgttctgcttttaaaatccacattgaaaaggcaaagtgacatgtgcttaagaggtctttaataaatactttggtcaagaacagggagggggtagtttaattcctcctgattagacccgcctacttcccggccatctgaaatttaaatttaagtaaaagtcagtatgctttctaaataaatgcagtttcacaacacaacctttagcccacactcaagcaactatatggctgcccctaattcctcctctattgacattcaggagctgccagggtttctgtaaaagtacctgaacacagtggatcaaccaacagtggctctggggtttagagttttgagcagcagctcagaatgatatccatctgcctttctgaatcacagccaacttctggcctctctgcacagatttggtgcaggaaactagccatacccacgcccacacccacagctcgccccgtgcctccttcatcttcataattctgctcccaccctcttccctcttccttgcccttcaagttgcaacactgaactgagtttatggatgatgctcaacaatttattgttgattaactgattgattgattctgttgctatggaaaccatcagattctagtacaacagtgggattccttcctgactttatgcttgacaaaatgctgactctctgtgcttgcttctcccagcttgccacctccatctgggtcaggaggagcaattggaagcagaagctccaagagaaaggtgggaatgttggtaaacccaggtgaaaaaaagcaacaaggagggtaagtggccctgcaatgtggaaatttccatcagaagcagcctacacagtgattataagtgtcagggcttttagatcaagctatacctgggttcaaatctcacttcctccacttattaggcttaaggttaattaagcctttcagccttcattttctcatttgttttaattgagataatactgtgcctttaggttgcctggagaaattacgaaatgatacaaggaagttagaaagcagagtgcctggtacctacgggagccttgcccaggccaagagggatgcagacctcccattttttaaggctcttagatagaaagtgaatagcaacaatattacataaattgaggaagagctttatgtatacatttttttgaattatcacttttttagtacaaaaatacaatgcaagattataggaattctagaaaatattaattcaaggttcctcatgactctgtgtctagaaattagacacaaagtctgaatgataaatatcttcttctcaggaaatctttgtgattttatttataaattgtttgaacatgatgtcatagtcgaaacttgtggtcctttgtgactgagctgcccagcattctgcctcaataaacctccctggacagggtaagtgttcatttagtgatggccacacctgtcatcccagcactttgggaggctaaagtgagtgcatcacctgacatcaggagttcgagacaagcctggctaacatggtgaaaccctgtctttactaaaaatacaaaaaaaattagctgagtgtggtggcgggcacctgtaatcccagctactcagcaggctgaggtaggagaatcacttgaacctgggaggcagaagttgcagcgagccaaaatcaagccattgcactccagcctgggcaacaagaatgaaactctgtctaaaaaaaaagaaaaaagaaaaaaaaattagtaattttcagcatcatcataatgtctccagtgaagctgaaaccaccacacatactgcagatggagttttgtcactgtacactgcacaatgatagggacccctggggcacctccagacagcatgaaggtgactgacctccctgtagactaacctcctagaccctgtgcatcagtgtgacgagtgcatgcatttcatgactcagttcaaacggcagctcctctttgaacaggaccctggctgctcactcatagtaatgcccttttgtgtactcccagtgcagtttatttatacatctgtttaataattaccagatgcttccagtgttccctttgcccccttggagttaaattcttcccagcccttttggagttaaatatggccacatgaatttgatgaagcaaacatgagtgaaagtgacatgctccttacgagctaaggcacagtgtactagggttcctttccctctgccacagcaaccagcaacagctgctatgtcagcctgggccctagagtgagaattatatgagtggaggccatgaacatttaggacaaggtttgttgattaaaaacactgaaagttgtcgattgttactgtagtattaactgacctatactgattgatacattctgttttagactgactgtattgtaaaaattctgtttatatgtttgtctgtcctcataaccaagaattttttaagggtacaagctgtgtcttactcatttctgattctggagcttccagcacagtgccaacatgcactcatatatacataatggatgcttattaatatgtgttggctagacaagtaaactttaagtgcggtctgtttgagatatcactacattcattgatggcttcatgccattgccacatctatgcttttttggaataaggtcttcatattccatttctttatcacttctcgtcctgtggtataagaggtcgtctaccacgacatcatgggttattcccacatcttcagcaactctcctgattgtttcagacatccattcatccatccatccatccagtcttccatccattcctttactcatttatacatatgttcatttattcatcaaatattgtctgaatgtccactgtgtgccagggactgtgcaataggctgggaatatggatatgcataaaatgtatttatctctctctcctctccatcttcccttccctgtgaagggacagcaagaagctccaaaacaaaggtggaaatggtggtaaatctggatgaaaaaaagcaatggagacgggagatgagggcacctgtgatgtggaaaattccattagaagcagcctacacagtgattatgggtattggtactttaggctcaatctagacctgggttcaaatctcagttatttcactgattaggcttaactttagttaagtcttttactttctgtgtcctcaattgtaaaattggaataatatctgtgcctttaggttgctaggagaaatgaatgaaatgatacaagtaaggtagaaagcagagtgctttctacaagccaagaagtggccccccaacagataccaagctctggacctcctggtgccttgattttggacttcccagcctttttcagacctgtgagaaagtaagtttgttgcttaaaccacccagtctctggtattttcattacggcaacatgaacagactaaagggaaaaaaagacaagcaaacagatgtgaaaaatgcattatataacaaaaaatggttgtcaatgctaagtctaagttgtttttatgaacaaaacctttcaagtttgaaaaatacttccctagtctaatcatcttgtttttcagacaaagaaactgaggatttgctgggtcagggaagcaaccttttgcttagaactctgctaggtggcttagggtgcttgagaatcatgagggtctgacctaacccaagaaagacaagcagttaggactagctctcagcctaagtttgtcagtctggctttccagatccgcttccatgatacaccactgagggttttttgtggaaaaaaaaaagtcaggggccaaattggtaccattgaatatgctagagcaacatctattaacagaccacatgcaggtctaatgaaacactcccggggggttgtgttctctctgtttgtgtatcagctaataggagccctgactgtcacagggccagaatgcatgtggatgtaccagctgcacctatgtgtgttggggtgggagaggttttcagggcttggttaagctgcataggccatgaccttgttccctgtgaggaagccagagtgtcctagtggatagaggagtatggcccttgtcctggacagatttgggttcaaatgctgagtcagccacttaaatatgagcgtactgaatttccccatctgttaaatgcagataacaatgtaagtttgttgataagcgccattgaataatttacataaagcacagaggctagcctatgaaaatccacactatatggcaaatgttattgttcccaatgtcatcgttaaataagataacatatacaaagttatcaggccagagggtgctcaaaacaaattatttattgtttttattatcaatattatatacaaagcatgacattcttaataaaccagctttgggatgtcagcaagttgacagaatagaagctttctactgttattcttttgcagaggcatcagttttgacaagtactcatgaatagtgggagtctgggagtccagtggagaagtttttgtttttgttgtttttgagatggagtcttgctctgtcacccaggctggagtgcggtggcacgataccagtggagaagttccagcacactgttggagaaaaaaatctgagaatagatgcatgaaaagagtaagaagaacagttttggccaggtgcagtggctcatgcctataatcccagcactttggaaggtcaaggtgggaggagcacttgaggtctcaggagcttaagaccagcctgggaaacacagtgaaactctgtctctacaaaaaatgttaaaaacaaaacaaaacaaaacttagccaggaatagtggcatgtgcctacagtcccagctactcaggaggctagagcaggaggatcactcgagcccaagagttccaggttacagtgagctatgatcacaccactatactccggcctgggagatagagcaagaccctgtctcttaaaacataaaatatacaaaaagagtttcacattacgcacatcacctctcctctatggtggcatagcttggtgccaagagacacccccacccagtcccatttctcccataggggaaagtaagagcatagtgagtgaccatccatctctcccagtcatgcaaggtgctgccaacgaggcccacctctttcttacctcacctgtattagtgaggtgatcagcaaagctgacaggctgggagagtctgggagcaaggaagagatgttgtgtaccctactaactgctccatagattccatcaggaagattgcccatgagctgtttgggacacctcatctatggaccccctccacacctgatccaccagcatcccaaatgctctgtgcacctcatcttccctccccaggccagctcctcctcaagcctgtccccgtggatggtaagttcatcccatgcagatagctgacttgactgtacaggattaggagaaggcatacaaagttgagcgtttcagggcactaccctgtggaaaacaaatgagaggctttcaacatctgatctggctttgtgggattgagagaggcaatacaatctcaagaattccctgccaaaagggaacaagaagtatgaaacaggcacattcataaaaaagttttgagtgagcctcagaatccataggcaggataactggtataggcatttctttccttttcctgaagccagtcagtaaagactgaaaaaagtgattgttttttcaagtgtacagacagcaatacaagacctcaaggaacaggaaaaattaaggaaacatgacaatacgaaaataacacaataatatttcagtaactgatgccaaaaaacggtcatctacagattgcctgacaaagaattcaaagtaattgttttaaccattgtagctcagaaagctacaagagaacacaaataaaaaactaaatgatatcaagaaaacaatacctgaactaaagttcaataaagagataggagtcacttaaaaagaaccagacaaaattccagagatacagaatataaggaataaaatttaaaaatgcaatagagttaacagcagacttggtcaaacagaagaaagaaactatgaaatcaaagacaggttacttgaaaatgttgagtcagaggaggaaaagggaaaaaagaattaaaaaaagaagacaaaagcctagaagatttatgggataccatcaagaaagagctaacattcatgttatgaaagtatcagaaggaaaagagagagaaaaggttgcagaaaacttatatgaagaaatagtggctgaaaattttctcaacctagggagatatgtggatatccagtacacgagactcaaaggatcccaaataggttcaactcaaggaagacttcacagacacattataactgaactatcaaaaattaaagagaattttgatagcagcaacagaaaagagtcttgtcacatacaaagtaatctctaacattatccgcaggcttttggcagaaaccttacaggccaggagagagtgggatgatacattcaaaatgctgaaagaaaaaaattttcaaccaacaatacttcacccatcaaagctgtccttcagcaatgaagaagaaagaaaagctttcctagacaaagaaaagctgatggagtccattcccactagacctatcttacaagaaatgataaagggtgttctttaagctgaaatgaaaagatgataatcagtaacatgaaaacatttgaaagtctgaaactcagtggtaaagctaagtcaaatagaataatactgtagtggttctttgtaaatcacttataagtatagtataaaggttaaaagatgaaagtattaaaaatagcaatagctataataatttgtataggatgcaacaaaagcagttctatgggagaagtttatagtggtaaaatgtcaacaggaagttaaaataagtctcacataaacaacctaactttacacatcaaggaactagaaaaataaaaactaacatcctaaagttaatagaagaaagaaaataatgaaaatcagagcagaaataaataaaaaagagagaaacaaaagatgaacaaaactaagacttggatttttgaaatgataaacaaaattgataaccttttagctggactaagaagaaaagagagaggactcaaaatcagaaaaaaggagacattacaactgataccacagaaatacaaaggagcataagagactattattaacaattatataccaacaaattagataacctagaagaaataagtaagttcctgaaacatatagtctaccagactgaatcacaaagaaagagaaaatctgaacagaccaataatgagtatggatattgaacaagtaataaaaagcctcccatcaaagaaaagttcagcacctgatgacttcactacagaattctaccaaatatttaaggaactaatacaaatcattctcaaactcttccaaaaaattcaatagagggaacactttcaaactcattttgcaagggcaacattaccctaataccaaaaccagacaagaaaactgaattataggccaatatctccgatgaacatagattcagaagttctcaaccaaatactagcaaaccaaattcaaccacacattaaaaggactgcacaccatgattaagtggaattcatcccaagggtgcaaggatgatttaacatatgcaaatcaataaatgtgatatatcacattaacagaataagggatttaaaccatataatcatctcaatagatgcagaaaaggcctttggcaaaattcaatttccttttttaatgtccttttatttttatttttttgaggcggagtttcactcttgtcacccaggctggagtgcaatggcataaacttcgctcattgcaacctctgcctcccaggttcaagcgattttcctgcctcagcttccagagtagctgggattacagacacccaccatgatgcccagcttatttttgtatttttagtagagatggggtttcgccatgttggccaggctggtctcgaactcctgatgtcaggtgatccacccgcctcagcctcccaaagtgctgggattataggcatgagccactgcacctggcccttaacgtccttttatgattaaaaaaaaaaaaaaaacctcaacaaattagatacggaagaaatgcacttcaacacaataaaggccatagatgacaattccacagttaacatcatactcaatggtgaaaagctgaaagcttttcatccaagatctgtaacaaaacaagcatgcccaatcttgccatttctatttaacctagcactgaaagtcctagccagagcaattaggcaagacaaagaaataaaaggcatccaaatcctaaagtaagaagtaaaattgtctctgcagatgacataatcataaatagaaacactaaagattccataaaatctcagttagaattaataagcatattcagtatagttgcaggttataagatcaatatacaaaaattagtttctatatgctaaaactactcaaaaaagaaattaagaaaacaatcctattttaaaaagcatcaaaaagaatgaaatacttaggaatatatttaaccaaggaagtgaaagacctataaactataaaacattgattaaagaaattgaagatgactcaaataaatggaaagataccctatgttcatgaattagaagaatattgtcaagtgtccttactaccctaagtaatttatagattcaatataatccttatcaaaaattccaatggcatttttcacagaaaattcatatggaaatacaaaagaccctgcatagccaaggtaaaaagaacaaagctggaggcattacactatctgacttcaaaatatatcacaaagttatggtgattagcacagcatggtactggtgtgaagacagacacatagaccaatggaacagagtagaaagcccagaaataaacctatgcatttatggtcagctaatttttgctaaaagtgcaagaacacacaatggggaaaagacagtctcttcaaataaatggtgttggtaaaactggatatccatatgctgcagaagaaaagtagaccctcatctcacaccacataaaaagtcagtaagaatggattaaagacttaaacataagacttgtaactataaaactgctggagaaaaacataaaggaaacttgcatgacatttgtcttatttttcggatataactccgaaagcataggcacaaaagtgaaaataggatggtatcaaactaaaaagcttctgaacagcaaaggaaaaaaatcaacagagtgaagagacaacatacagaatgggaaaaaatatttgcaaaccatatatctgacaaggggctaatatccaaaatatataaggaactcaactcaagagcaagaaaaccaataacctgatttttaaaatgagccaacaacctgaatggacattcatgaaagaagacatgcaaatggctgacaggtatatgaaaaatgggcatcactaatcatcagggaaatgcaaattaaaaccacaatgagatattacctcacaccacttagaacggctactttttatcaaaaagacaaaagataagtgttggtgaggatgtgaagaaaagggaacacttgcacactgttggtggtaatgtaaattaatactgccattatggaaaacagtctggaagtttctgaaaaaaataaaaatagaactactctatgatccagcaatcctactactgggtatatattaaaaaaatcagtttgtcaaagagatatttgtactccatgttaattgcaacattattcacaatagccaaggtatggaattaacaaatatggaattcattgtcccttaatggatcaataaagaaaattatatatatatatatacacacacacacacacatacacacacacacacaatggaatactactgagccttacaaaaataaggaaatcctaacattggttacaatatggatgaatctggaagacattacgctaagtgaaataagctaggtacggaaatataaataccatatgatcccacttatatgtgtaatttttaaaagacatacttaggcagaaagtagaatggtggggctaagagcaggtgagagttggggagatgttgatcaaaggatgaaaaatttcagttagataggaggaataagttccagaaatctattgtaaaatatggtgactacaattaataacagtgtattatattcttgaaaattgctcaaggaaatcagagaggacacaaacaaatggaaaaatgttccatgctcatggataggaagaatcaatatcgtgaaaatggccatactatcaaaagtaatttatagactcaatgctattcccattaaactgccattgacattcttcacagaactagaataaactattttaaaattcatacggaatcaagaaagagtccatatagccaagaaaatcctaagcaaaaagaacaaaacaggaggcatcatggtgcccaacttcaaactatactacaggctacagtaaccaaaacattatgtaatggtacaaaaacagacacatagaccagtggaatcaaatagagaactcagaaataagactgcacacctacaaccatctgatctttgacaaagctgacaaaaacaagcaatgggggaaagattctctatttaataaatggtgctgggagaactggctagccatatgcagaaaattgaaactggaccccttccttatatcttatacaaaaattaactcaagatggattaaagacttaaatgtaaaatcccaaacaataaaagccctagaagaaaatgtaggcaataccattcaggacataggcatgggtaaagattatatgatgaaatgccaaaggcaactagaacaaaagctaaaattgacaaatgggatcattttaaactgaagaggttctgcacagcaaaagaaactatcatcggagtgaacagacagcctacagaatgggagaacatttttgtgatctacccatctgttgaagatctactatccagagtctataaggaacttaaacaaatttataagaaaaaaacaaccccattaaaaagtgggcaaagacataaacagacacttctcaaaagaagacattcatgcagccaacaaacatatgaaaaggagctcaacatcactgatcattagagaaatgcaaatgaaaaccataatgagataccatctcatgccagtcagaatggtgataattaaaaagtccagaaacaacagatgctggtgaggctgcggaggaaaaggaatgcttttacactgttggtgggagtgtaaattagttcaaccattgtggaagacagtgtggcattccttagagatgtagaggcagaaatactatttgacccagcaatctcattactgggtatatacccaaaggaatataaatcattcgttataaaaatacatgcacgtgtatgttcattgcagcacaattcacaatagcaaaaacatggaatcaacccaaatgcccatcaatgatagactggataaagaaaatgtggtacatatacaccatggaatactatgcagccataaaaaggaatgagatcatgtcctttgcaggaacatggatggagctggaagccattatcctcagcaaactaatgcaggaacagaaaaccaaacactgcatgttcttacttataagtgggagctgaatggtgagaacacatggacacatggcaggggaacaacacacattggggcctgtggggggtaggggtcggggggagggagagcgtcaggaagaatagctaagggatgctgggcttactacctatgtgatatgatgatctgtgcagtaaaccaccacggcacgtgtttacctatgtaacaaaactgcacattctgcacatgtaccccagaccttaaaataaaagttgaaggaagaaaaccagaaaatcactaagagtagatttttaatgttctttctcaccacaaaaattataagtaggtgaggtaatgcatatgttaattagctcaatgtagccatttcacaatgtacatatttcaaaatatgttgttacataataaatgtatacttttttgttagctacacctcagtaaagctgaggaaagcaagaaaccaactttggatttgagtgtgcccaaaccagtggccaaaaccagatttttgtgtgtgtagttagctctatgtacaattttttctgtctacacagttgaaaccactaggaagacagagtatttgcctcgaagctcattgcagattctagcagtttaatttggatgaactgcttggcttcagaaagagacatgtattgcagtcaggcaccccatgtgcacagttaacagagcccactcaaacagtgaaacattaaaatctagtgcaaaggtcctctgtgcttcatccagaattttataggactctaaagcccaaactgaccataggaatcactttttgtgacccaaatgtgatccatcaaaaggatgtgatgaagagaaaattcaggcagttctgaaccagagccagaggagactgtgtcggaagctgtgtctcagctttgaagacatatgtagccataaaatgaacataacatccagaaacaatcttgccagaagttgtgaattattggcaaaggaaaataactgggcattgtttgaacaagcaaagacatttgaaatctcctggttctcaaaatcactgtgttgccctagggcaggtcccaggcctcatcatggcaggagcggggcaggtggagactgatggtagaggggaactctgtgtactctagtgccaacctcaacccagaagtgactatcatttgaaagttgaaggaaagctgagaatctgcatgagacatgtataagataatgaggaggacccaagctctccaagggcaatcagaatcaagcatccacacaagatgacacaggcaacttctcacatagagccattttcctagagccattatcttttctctcagttcacaaaaacatgtgactgccctctcaaaacgtcctgttatgaattgagcacagtccccatttgtagtgtgaaagggcagagatccagtggggttaattctcatgatctgaaaaccattgagtgcatagcatttaaagccactgggtttgctccattctaagtcttttcaatagattttaatttgacactgttaaattatgcattcatgtatccattcacttctcagcaaatatatattgccactacatgccttccatcttgaaatgtcataaccccagctcccatcccatatgggacagcttcctctttcactctttgtaattccttctccttttgcccagaaaattttctcatgataagcattgtggtataatttaacaatgtccatgatctgtgtgatgcactatgtgttttcttttacatctatattttcttctacgtgatgtatgtataatgagtattatatggagaaaaagccagagatttaaatttgaaagtttggtgatgctgcctgcagaatataatcaatagcctgttcccagagcccagacaatggatcctcattacaccctttaaaccggtattagaaacatgctgctcctttgactacctcctccacgtcagccctctacccatgtcttaatgggcatcacctttcttgactgtatattatcttcaatccatttttcacctggagttcctggcgtaagcctaacccttaacatctttctggtgtctttctaagggaagaggggagttgaatgcctcctgaataatctcttaaattttaatttaggccgtctgactcactcttttaagatcattcagtaacttcttattactttagaataaatacagacttttttgcttgacattccaggaaaactggattctccttatctctccggcatcctctattgccctgaacacactgttcatattctgtttttctcattctgaaaataggaaatgcagtcaaaccagtagttctcaaagtgtagtctgtgggccagtagccacagcattccctgggtgcttgtgagaagtgcaaacccttggtctttatcccacatctactgaattagaaactctggaggtgaggccactatcttaaccaactattttaatcatccagatgatcctgaagcttgagaacaattaatttttatgtgtgatgggggcaggggcttgctctgtctcccaggctggcatgcactggtgtgatcacaactcactgcagcctcaactcctgggcttaagcgatcctcccacctaagcctcccaagtagctagacctacaggcatgcaccaccatgccttgctaacttttcttgtgaaggcagagtctcagtattttgcccaggctggtctcgaactcctggactcaagaaatcctcctgccttagtttcccaaagtgctgggattataggcatgagccaccacactgcaccaagaacaacagatttaaaccatttcacatgatggaaggcaccaattaaacacatataaaatgtctgcttagcctagtctaaactaccaaggattggaagactttaatttccttgggaggtctcccagcaggttactgtggcttttatcctgccttctcactttttggaagctctcagaacagggaagtccttcagaggagagaatatcggtctccttgtccatgttctcatccctcccattttcccatgcctctgattgtgtgccctctgttctacctcctcggtgttcctacgtccctgggaaataaaaagtagttgcttcccacgaaaagatgagaatgttcttcagagtaaaagtgaagtcttttaaaagcctcatttgagatattgtgttatcatcccataatatgttaactgaagggaatggagagggaagaggcaccttcgttcagagtaaagtaattgaaaagcttaatatacaccgaactgtgtctttacagggtccgccgcatcttggaaggaaacttcaaagctcatttaaagtcagcctctcacatagccctgctggtctaactttcttctgaatgtgatttcagaagtaaaaccaggccaggggctgggactcaggtgagtctcactgaccgtgacctctggagagtcaactgaaatggtaagccaggaagtcatggaaatcttacctcccctgcagtaacaacgtctactctcaaagaaatgccaatggcacagaaaccacaggggttgtttatctctttcttttttctttttaaacattataaaaataacacagcaatttctaaatgtcaaaagagagagaaatgaagctatccataatttcaaaagcctatcctagtaactactgtagatttttgcctgagctttttaggcttgggccatttgtgctctgtgctgatgcgtgcattgtgttttgaagtttatcttttttttaaccttatcattcatacattttccccagattgttgccaggtaaaccatgcaatccagaattatggactatcagagctataaagggttttggagatcattttctgaagcaattcttaattggctcttcaaagatgagcttttgacagtttgtgtcacccctgaaattatttgtgaaattctacactgagtttgtgaatctttctacagatagtgttatccctgtatttcattagatcttcaaagtggtttacacgccctaaaggttgtctattcttctcatgcagttattctatgtgcagtcattcaagctgtgttttactcaacttgttgttggagggaagggggaatagcacataggctataatatcctctagagttgtgcagtacacaattgcacagccatggatggtggactgacattctaatccatccttattttgtggttggcaccacagagctgaggagtaatttgccctgtttccatagctctttgcacacatttctttaaacacacttgcattatattgaaatgatttgagaggatctgtttaattctagtacttagtattaagaaacccaccgttgcatacactaatgctatgttttccaatatcagctttattactaacaaaatttacattttattttccctctgcttgacttctatttttcaattgattccaaacttagatagaaaagagagatgcaattcattgtccctgaaaccttaaacatgtacatgatgagtcgatcaacaattcataaataaaagaagaacaaaaaatagctatataagacagtgaggactaagaacggatgaaaaatgaattccttctctagtcctaactgctagaaatgtttcccctgagggtatttttgtactttgtcatttctctatttagaaacctcagctccctcttctattaaattttgcaagggcttctgataatcttaacaattaatagctagtgcttacagttctcaaaacacttgcaattacattagctcatttgagtctcaacaggaacaggtgtcgtctccattttacacaaaaagaaaaaataactcagcaagattgagttatttgtccctgcaagtggcagagctgggactcgaacagggtatatctgacttaaatacatcacgccaagtcccagtgccaatgtggtagacgctgccaatgggtgccaatgtgtggttctcctctatgtccagataagtaagactgtgcttccttgccctcttaaagttggctatgtttgtgttaccagatatagccaataaaatgagaacaaaagggatgtgtgttgcttttggaccaagtgcttaagtcttagtggtcaactcaccagttttccctcttcccttgctacagcttttaacacatggaagcactttaaaaaaattcaacttttattttagatttggtggtacctgtgcaagtttgcattgtgtgatgctgaggtttggagtacaattaatcccatcacccaagtactgagcatagtacccaatagttagtttttcaatggttccctcccctttcccttccccctctaattgtccccagtgtctgttgttttcatctttttgtctatgagtacctaatatttagctcccacttataagtgagaacatgtggtatttggttttctgttcctgcgttaattcacttaggataatggcctccatctgcatccatgttgcaaaatacattatttcattctcttttatggctgcgtagtattccttggtgtatatgtagcatgttttctttatccaatccaccattgatgggcaccaggatttattccatgtctttgctattgggcatagtgctgcaatgcgtatacatttgcatgtatctttttggtagaatgttttgtttttctttgagtatatacccagtatgggattgcagggtcaaatggtagttctgttttaagttctttgagaaatcgccaacctgctatccacagtggctgaactaatttacattcccaccaacaacgtataggcattcccttttctctgcagccttgacagaatctgctattttttatttttaaaataataatcattctgaatggtgtgagatgttatctcattgcggtcttgatttgcatttctctgatgattagtgatgatgaacttttttgcataggtttgttggccacttgtatatcttgtttgagaagtgtctggtcatgtgttttgcccattttttaatggggtaatttgtttttttgcttgttcaattgtttaagttcattatacattctggatattagacctttgttggatgcatattttgcaaatattttctcccattccataggtcacagattactctgttaatagtttcttttgctgtgcagaagctcttttgtttaattgggtctcacctgtcaattttttgttgttgcaattgcttttgaggacttagtcataaattatttctcaaggccaaagtctagattggtgtttcgtgggttttcttttaggattcttacagtttacagtctaacacttaaatctttaattcatcctgagttaatttttgtataagtgaaagggatccaatttcactcttctgcatatggctagacagctatcacagaaccatttattaaatagggagtcatttccccactgcctatttttgtcaactttgttgaagataagatggctgtaagtacacagctttatttctgggttctctattttgttccagttgtttatgtgtctgtttttgtaccagtagctttatagttagtttgaagttggataatgtgatgcctagggctttgttctctttgcttaggattgctttggttatttggtcactattttgggtccttatgaattttagaatagttttttctagttttgtgagaaaatgacatttgtagtgtgataggaataacattaaatctgtagattgctttgagtggtatggccacattaattcttccaatctatgagcatggaatgtttttccatttgtttgtgtcatctgtgatttcttttagcattgttttatagttttttcttgtagagatctttcacttccttggttagaggtattcctgggtattttattttttgtgtggctattataaatgggattgtgttcttgatttggctctcagcgtaaatgttattggtgtatagaaatgttcctgagttttgaacattggttttgtatcctgaaactttactgaagtcctttatgagttccaaaagccttttagcagagtctttagggttttctaggcatataatcatatcattagtgaagagagatagtttcacttcttcttttgctatttgaatgccttttatttctttctcttgccagatttctctggctagaacttccagaagcactttttgatatgaagatgctgtaagacaaaaatagcctagaatcatgagtcaacatacggaggaaattttctctaggaagctatctggtcctgcagaagactttgcttgagccagaacttaactttcactgtggtcagccaagaagattttgggattgttggttgccacagcataacctagcctaccctaaataatactggcagactccatacatgactgggtctctctcccttagagctcaggctagtgttcagagaggcatattttgtcatgcacaacttatcttccctcacacaattcagcaatctccttggctgtttttcccttgaatctttagtaaccaaattttaaactgttaatctgcaggacatacagtccagaggaggacagctgggaaggggcagattcctgactggctgagggtagagagaacctcagatgtgatgaatgttattggcacagtggatatttgggctgggtcacaaatgaatttgctgtgattgcttgtagtggcctaatgagatgacatcaacatcattgttccaagaccagtaaaaatagaaaagatcaaaatagcagaagtcagggccaagtaagagaggagatgggctcaacttgctgggagctgattcagcaccacagacagatcccatgggccctctcctctaatgttttttttctgggcagctcaattttctcaggttagctttgctgttagagagtccttttcagcctccaaatgcccagttcctcctaagcgaggactagtagtgctgtaggccggggaccatatctgtattcatccaatacagtgcttcccaacttatttctctctatattatgttatgcatgagaatatttacctggcctcctgggataaatacttgaagccacttctggctggaggtgacaaacctgtgagctccagctatcctaggctctgcctgatgggcttaggtaatcaatataccacacatttataacttgctcatgagaagctgtgttccagtcatctcttccttaccctctgccccagtcagaccgtaaatgaccagatcatatagaagtcagaccataggtcttattgggtgacttggaggcaaagctgggtctaggtcttccataacttgattttggctcccttggatgctcttcccaaatcttatgctggaagccaggccaagggtgcagaagatgaaggcaaagcaactgggggtgcccactccctcctaccatctgtcatttgacaaatattgagcacttaccatgggctaaacctatcctagcccctgggaatgcagtagggaacaagacaaatatggaccctgcactcatggaactcacagtccatcaaggaagcccaacaattagccagcaagtattaaaaagtctggtcagtgttatgttgatgatgtactgggatgctatgggattacctagctggagaaactaatttatttggtatgggaaatgggggatgggttcagagaagacttttggtagctttaatccccttttgaacattctcttactgtatgtctaactaagtttaactgtggggagttaggtatcagaagaaccagcccccaatatttcaacataggttcttttctattttccctaagtgttggctggtctgagaaataaagagagagagtacaaaagagagaaattttacagctgggtctctgggggtgacatcacatgtcagcaggttccatgatgccccctaaactgcaaaaccagcaagtttttattagggattttaaaaggggaggggggtatgaatagggagtgggtcacagagatcatatgcttcagagggcaataaaaggtcacaagggcagagaggcagagtgagatcacaagaccagggtgaaactagaattactgatgaaggtccatgtatctctgggcacacattgtcattgataaacatcttaacaggaaacggggttggagagcatacaaccggtctgactagaatttgccaggctggaatttcctaatcctagcaagcctgagggtgctgcaggagaccagagcatatttcatcccttatcttcaactgcataagacagacactcccagagtggccatttagagacctccccctgggagtgcattcttttcccaaggctattccttgctgataaaaagaattcagcgatatttctcctattcgctttctgtaagaagagaaatgtgactctgttctgcccggccccacaggcagtcagaccttatggttatctcccttgttccccgaaaatcactgttatcctgttcttttcaaggtgcccagatttcttattgttcaaacacacatgctttacaaacaatttgtgcagataacgcaatcatcacaggatcctgaggcgacatacatcctcagcttacaaagatgatgggactaagagatttaagtaaagacaggaataggaaattataagagtattgattggggaagtgataaatgtccatgaaatcttcacaatttatgttcagagatttcagtaaagacaggcataagaaattataaaaatattaatttggggaactaataaatgtccatgaaatcttcacaatttatgttcttctgccatggcttcagccggtccttctgttcaaggtccctgacttcctgcaacagttagggtctgacgtgtagtatagatttttcatgattttgaaattccacaaacattttccacataccatttggacatttgtccttgcattacctcccaatgcccttgcagcaaccctggagtcagggttttatattgtttcattttccttgcaggctcagagagatcccactgctagtatatgatggacttaaatgctgagttctttcccatgcaggagccccatatgccctttgtcctacccctgggagtatacctctccaaactctcaaaggtcctgttgccctccagtcttttacgtagaagcagtattagagccagcttaaatttattcaagatgtttagttgcttcagagaactgttccctgcacattttggctgcagcaggactgccctcactgtccccctttgtcagagggtagtaaatgtcactccaccacatcacagaggaagtcttatccaccagataaaaggattccatccaacagaacagtgatccttcaatccttagaccactccagctagaggcccagacaatgcctgaggcagagaaaaatccccggagacacagtgctgacacgtcctgttatggtgaaggtttggctcttcctaatcatgaacactggagaatggtgagattttgcttcagagctggatgagtctagctgagttgccagagttcccaattgtcctctatatttaacaactgagatacatgtttacctctttttttatatgttagtgcgcagcagtggttgtcaagataaagtcagggcccagcagggcccagaacagcatgcctgggtgagcctcagctagtttattgcttatactgtaatgtgaaaaggtctgtgctttccttgtggccagacctttctcttcttacctcaaacaaatcctgtttaaggcctctgctcccattgtttcctctttcagtgatggctgtctgctcgctgactgcttggccaatatcagcacattttccaaatcgcagcttttcttctatcctgaggccctttctgaccctactcctctgcaaggtagaattggcctgctttctgcctctactgtgcactacacacacctattacagcattgatcatacactacatcatatctcttgtgccccacaaggtgcagcatggacactgcaaatccttgttgagtgagctcatgcatttgctattatgggaagagcactgtgctgagggccaggaggcctgggcattggtaccagctctgtcattggtaccagcttggccaagccattccaccactctgagcctcatttctctctcctctaaactggaagttagagttgataaggcctaagggtaacttcctgctctaaatttatatttagaaagcaaagtgggaagaactttgtgatggttttctgatatgttaacttggctagtctacagccccagttattccatcaaacactaatctaggtattgctgtgaacatattgtatagatgtgattaagatccataatcagttgattatcctagataacctgggtgagcctgattcagctaaatattcttaagagcagagctgaggattccttgaagaagaggacattctgcctgtggatagcagcatcggcctgtgcccaagagttcattcctgacctacagatttccagcttgtcttaccagtccccataattgcataacccaattgctttcattaacatctctctatatatctccctttggttgagctctgacccacataagcttcatactttgattcaagtatatgccttatacttggttcaagccctggctctactacttattagctgtgtgatcttaggaaagctagtgagtggctctgagcccctgctttcttatctataaaattagggtaacaatacctattccacagttaataataaaaactattcttattttgttttagagcactacttttttgatattttctgtgaaccagcttctgtgcttattgctttacaactcatttactcttctttaaacccttgtagtactaaatgacataatgcatatgagtaatgataaacaccatcatgcctggcacattgaaggtgcttagtaagagctaattctgacttttcctttcctttgcctctataatatttctgaataagctatcttaaggcaaatttattgtaaataatggtttagactgtgtatgtgacttaaaggagccaagctatgggattacaacacaattagtttagttcactcactcttgtctccaggtttgcattaaaccaacattagattgtcttggaattccatagtaccttctgtttgaggatttatggaaatagtccatatgaagcagagaagaacaagggctactccttactcgatggaaaaagtgaagcaaccagaaatgttttgccatcaagttggaaaacatcaattctctaaatgtaccagagatttatttcatactatgaaagtcagatttgaaaatattacagatgaaatattaactgaatgtttatagctgggataggaactgtgagggaatttagaagtctctacctgccagtaagaggtttactgacttctagaaactcaacagtatttaaacacaacaaagaccacttgttcattcttgagcagatataggcctacccactgcctcatgtctctgtactcaaacattgagaaagagaaggaaacagagttagtgaatgggggattggtgagtgccactagaaggttattgggtacatagcttgggaagataaagcttgggagtaagggtggtttggcaagtggatgtgcaggaaaaaatgtgtgagcataggaggaaaagattaggcaagtgaccccaggatgcaagttctatacttgagtcccaactcccatgtcagcctggctctttctccaggctcacgacttctcatagttgacctcaccaatgcctaccctcctgcagcctctggtgtaccctattttcctaagccaatcctgactgtggtacaaatataagttttaactgtttatgacaaaaatttaaaacatgtagagaaatagagagaatggtatgatgaacccctatgtaaccaccccccagattcaacagttctcatctcatggccagtcttgtttcatttatactgcctcccaccccatggattattgtgaagaaaatttcagacgtaatttcatccataggtatttcagtatgtctttctgaaagaaatacaaaaaagctataatgaatttattttacctaaatgttaatcataatttttaaatttaaaatattctgtccatgaattttttctttatatagatagatgatagataaatgatagatagatagaagatagatagatagctagctagctagctagctagatagatagatagatagatagatagatagatagatagatagagcttgtttgaatcaggttcaattaagagccattcattgtttttcatttctatgaataatatgtcttttttatctagtaatacacccttcatctgttttcctctccttgcaattatttgttgaagaaaacaagttgttattcctataggatttcccacagccttgatgttgctgactcatcttcatgatgccatttttcatttgtcatggtgaacatgtttcactgttctctatgttttttgcaaataggtaggtaaatctagagacttaatcagattcacatttgtgtgtgtgtgtgtgtgtgtgtgtgtgcagaccatttcataagtggtggtgagtatttccttcaggaagcacataagttccgaccgtttctctttctgtgatgccagcagctgttgctgatcatgacttagatctgttaattccttaggggttacaaatgttgatgctcttattctatcgttccttctttgtttttatatagagaagcttcatttcattaactatttgttacccagaagaaaaaaggaaatatgcttatttccttttatttgccagttttcaaataatatgtagggtttagagcaccctccaaagatgatcaatgaccaattctgtattattataaatcatgaatttaaacatacttaacatgtttaaattcattttagtttttatccttattgttgttcaagctgtttcatctttggccagtgggaggctcctcaacttagttcctgagtttttttgaaaaggtcctactggtttttgatagattccttgctttctggcataacaagatgtttcagactccctgtattaattttataggactgccatatcaaagtaccacaaatggagtggcttaaatttattctgtcacagttctggaggctagaagtccaaaatcaaggtaccaggcaagccatgcttcctctgagggctctagggaagaatcctgctatgcctcttcctaacttctggtggtcactggcaatcccaggcattccttggcttgcagctgcatcatcccagtctccgcctctatcgtcatacagccttctttcctgtatttctgtctgtttctgtttttcttcttgtaaggacaccagccattgatttagagcccactctaatcatgtatgacctcttcttagtttaattacattttgcaaagaccctatttcttagtaaggtcacattctgagaatccaagtggatgtgaattttgaaggaaaggctaccaattttggtgaggagaagcacacattgtaaagttcccaccgttgaggtttgtagtgagcaaatgacgacagaaaaagaatcagcaagaagaatcagactatcttcaaaaggaaaccaaaccagtagttcaagaggagaaaccttggtctggcattgaggtctaacaagcgtttctctggatgggtgactacacacacaaaaaatcacacatttaggagcagtccatgttttcagcagtaggtacagcacctttacagctcagacctctctcttccttattgtcataaggaggtttctttctccataagagtggaggttattcccctctttgcgcagatgaacaagcacaggagaaagaaaagaataaactggctataagtgtggtgtagcttgtaagaaggaggggaaaaaggaggagaaagataaggaagacaaacattgagaaaagaagctttcttggatagggaaattgaagaatgagccttgaaaggcagagttgaaggagcataaaagttggcatcagaaaggcctctgctactcacaaaacctgtgactttgaatatgtttcataatttctttgagattcagttttttaactgaaaatcaggaataatggtatccataataatatgcttgcatttattcatgtttctattgagcatcttctacttgccagatactattgtaggtgccagggatatggcagtggaaaaactagacagaaatatgtgcctcatggcttccattctaattcaggtagttgtgaggtaaaagtaaaactgcagatgtgaacactggacagatagcaagtattcttaaagagttagattctcttcatctgtcctaatgctgagccacagattcagagattggcagagcgcttaacttaacagcaatttatgtgagtgaggactctcctcaaagaaagaaaccaccactcaaagatcccattatgttctcaaagagtagggcaaaaaaaggcctacttgggataaatgtcagtgtttgttctctgggagtagttggggagatttgttttaatcttatgaatttttgtttgttcttgttttactgttctagtatgattgctaagaaggagggccttaggaggttccctagtaagatactattacatttttctctctcaaaaatgtattggctccctataaggtgactggatatcgattattatctggcctcaagttcccccctacaaaagctgctaaatctcctaggcccctgcctatgaagcaggcgtttggaattggaggacagattttgtattaagcccctaccaggcagatacttgagtgatcactggggctgaggtgggcatcttatctgcacagccttgatgactggaaggatcttccaagaatcccttagggaagcatttatgctcacttggactggtggcacctttgcactgtttttcgtgttggtttcccaaatattgagccctttggaaggatgctgggataaaactatagatcttaactttttgcttctagttggaaattcacatttcaggtactgcacagggcgaaggaatgttctaatggaattttttatttatttatttatttttattttttgcttccctggaagattgggtgattacaggaaggtgtattcacatgtggaaaaggtgatgaacttgtagcatcagtaccctacaaacttgaaacccatcataaaaagctttgatgatgtagcagaagacactttggttgacaccaggaatagcctttgactcttagatcagataaaattcctaacatagcacagttacagtggacaactgcttttttgtctctctttgagaatgttattatattctgtttgattgcagcaaaaaacttacatttaaaatcaagaaagcagagtcagagacccagttataacctctggaaacccaagagtttactgaagatactatttctctgggaattttaagccatcttatgggagaaaaagtttctagaatggtagcccagtctactgttgggaaaaccaataactggaaaaacacaattattgggatgcacactgctgatatataggcatatgctatgctttcaatctttttccccacagtcttatctctctgcttctgccttgaggaaagatcaaaggggttggcaggacaactaaggcctttcccttgagaacatttaagcaggcaactcaaagactctctttcctaccagagcaagaaagaaaaccacaggaaagtggaaaacaggctgtagacagacctctgaatgtgtttctaaatatttctaaaaatttattattctaatgaaaaggctcagagtaagttagaagaacatgttctgcttggctttgaagaataagcagtgattacacttaattaatgaaaattgtaccagatgatatcatgtcatttatatttaattcttgctctaaattttgtatcacttaaaaatatagtgattggccatggtggatacttaactcgtttactcagcacatatttattatgtatctactatgctagctactgagataacagtggtaaacatgcatggttcctgctctcatgaggcttatagtctagggataaagaaagtcttaataaaatcatctcactaaaaatatgtaaattttcagctgagacatgctgtgaaggtagtaagcatatggtgtttgagaacctataacagtcagattgtacctatctggaagtccctgaggaagtgatgtttttgtagagagctaataaatgagtggacgataacagggcttagaggagggagaatggttccagcagaggaaatagtgtctgcaaagtcctgggcaggaggtaggggacccacctagagaaactgagactactgtgatgaaaacagagcaaagaggagcttgaatattagaggatagtaagttggagaggaacagagaagatgatgcaaagcactcaatctctccatgccccaatatcttcatctatataatgggaataatagtaatatctatatttagggatactatgaaaatgaaatattaatatgcataaagcacatagtacctgtgtactttgtgctagctgttatcatcctttcccatatcccactgacagcattctagccatgttataatcggagatcttgctttattctaaacaatattatcagttgcttgaggtcagggattttgtcctattcatctttggattgcttgggtcttaaacataacaatggctaaataaacattttccaaattatttttttctggaacttaccatatgcaagacctatctaggcacagtgaagtctcaagttctttgagacttttgtggtttgaggatactaatatttaaaacaatttcttatcaaaatatacacacagcaaaagaaacataagtcaaaattccgacttaatatattttcacaaacaaatgcattcttacagccaactgtcagatgaagaaacattatctgcactcaggaaaactcttttatcctattttggcattattcacctccaagggaagtcactattctgactccaacttgactgttttgtagtttatatagatagaataaaacaatatagacactttcctgtctaacttctttcactcaacattatagttgtgaggtccatccacattgttgtgtgtagtcatagttcatttttattgctgtagcctatactataatttattcgttctactcttgatgggcttttgggcagtgactagtctgtgactattataaatagtattgctttcaacattccagaacatgtcatttggtgagtagatatacgcatttttattggctacacacctaggagtgaaatgctgggtcatagggtatacatatgttcagctttaggagatatggctgagctgttttccaaagagattgtaccaatttatacagcccaccagcagtcgatgaaagttgcagttccttcacatactcatcaacacttggcattttctttctttttctatattaattatgcttaaaatgtatatttgatcagcttctcaccaggttggaatgtagaaactgtggtacatctccatggcagggcaagccagggctgtgtcattaattcagatgattccctgccagaaatcttttattcaataatcagtgattaagagcctactctgttctagctgctggagattccaggagaataaagtatggtcccaggtcacgagccatcatggctcaagtcaagagaagagcgatggagttggatccttatatatacaaacaaggtgacacaacaatacagagaatgggattttctgactacctgggggccacagagaaggctcacaaaggaggggacatttgcgatctgtagttccaaatgtagttcatctgtagttcccataatcctcacatgtcatgggagggacccagtgggaggtaattgaatcatgggggtggttacctccatgctgttactctgatagtgagtgagttcgcaagagatctgatggttttatcagggactttccccccaattccctctgcacctcttgctgctgccatgtgaagaaggatgtgtttgcttccccttccaccatgattgtaagtttcctgagacctccccagttatgctgaactgtcagtcaaacctctttcctttataaattacctagtcttggatatgtctttattggcagtgtgagaacagactaatatactggctaatttataaaccacagaaatttatttcttacagttctggagattgggaagtccaacatcaaggcactggcagatttagggactggtgaggaactgttaactggttcatagatggtgccttatttctgtgtcttcacatggtggaaggggttagctagttttctggggtctctttaataaggacactaatcccattgataaaagctctactctcatgatctaattacctcccaagggcttcacctccaatatcatgccattgggatttagatttcaatatttgaattttggggggactcaagtgttcagattattgcactcattttttgatacactccagtatttcaatgtctctgttcgtgtagcatcttgagtggaacaaaatactcaagggttgtctttaccagcttgaaataaattgggacatcaacattaaaattctgaatacttaatttatactaatgcatttgtatttcagttagctttatgttttggcttgctgctttgtcgtatccagcccatttccctttcctcctgggcacacaactagaccacattttccatgtctcttgcaatcagctgtggccatatgactgagctctggccaatgaaacatggccagaagtagtaggtatcatttctggacagaagcaggtgggtgtacctttttctttgtctctctcctcatttaccagttgaatgggaccaccataaggaaggccgagccacagttggaaagagactgggcacctgaatgttgatgttgaaggctgctgggccatgccaccacaccggactgtgtcctagggagacgtacccatattgtgctaagtcacagagactgcaaggtttagcatacagcagctagagtcactttaactaaaacagggtaacagtggtctcccttgtcttgatcttctcttccactacttcccccaaagtactaacaaaagatccgcaattacatctgcaacttctcccagcacagtgagaattattctatcaggggagcctcaaggtcacttagatgaattctgaactctcttatggtcttttttgctcttggatctctatagggtctagctagtatgaccctgctttttccagtctgacaactattgattcttaagagaagagacaaactgaggcaggattggggcagttctgcattctctctctattggcaacactgcaacatctgagagttgttatttcctttgacgacaaaacagaaagcatgtgtccttcctcctgctgagtggcaaaacaagatgcccatcctacacactgtccagaacagcaggtcctcacagtcttctcagaaaatccaggccgaatgaagagaaaaaggaaggccaatgccagccagttgcatctttcatagaatgagttaagcattggcctagcataaggtacacaggcaggctgacatggctgatgggctcctgatgccacatcattagtactctgaatgactcagatactgttattttctggtaggtcatgttgacttgagatctagaagaaacactggtccagaagtcataatgcctgggtttcaatggatccaataatagctaccacttatggggtccttgctgtgttttagatcttcctgggcactttttatacatcatgtcaagtatctcttttggaataagatatgaatttctgtgcctataaattttatatatatttctattttacaggcaattttacagatatctccattttacagataaagacattgaggctctgactgctatatgctcaatagtatgctagtccctcccggaaatagattaagactctgacttggatgagtttaaaatctccttaaggaagtgagactttcctgaagcaatcggggaatcacacccaatagcatacaaagttagatggagatggagtgtcccggctgcagagagtgggagtgagagtcacacccagcctgagaggcctggattgccaggtaccaggggtcgggatggacagacaccaggagctaagtgggagtacagccagccttgaggtgtatatggggaggcatagttgaaaccagtctgggagacgggagacaggatatttggagtaagctcaggatggcctgtttttattctgtttggcagctggaccaggactgtcttagagcagtaattcttaaccttggcaagacataaaagatgctaaggaaatttttttttaaattatactttaagttttacggtacatgggcacaacgtgcaggtttgttacatatgtatacatgtgccatgttggcgtactgcacccattaactcatcatttaactttaggtatatctcctaatgctatccctcccccaaccccccacacaacaacaggccccagtgtgtgatgttcccctttctgtgtccacgtgttctcattgttcaattcccacctatgagtgagaacatgcagtgtttgcttttttgtccttgcaatagtttgctcagaatgatggtttccagcttcatccatgtccctacaaaggatatgaactcatcattttttatggctgcatagtactccatggtgtatatgtgccatattttcttttttttttttattatactttaagttttagggtacatgtgcacgttgtgcaggttagttacatatgtatacatgtgccatgctggtgcactgcacccactaactcgtcatctggcattacgtatatctcccaatgctatccctcccccctgcccccaccccacaacagtccccagagtgtgatattccccttcctgtgtccatgtgatctcattgttcaattcccacctatgagtgagaatatgcggtgtttggatttttgttcttgcgatagtttactgagaatgatgatttccagtttcatccatgtccctacaaaggacatgaactcatcattttgtatggctgcatagtattccatggtgtatatgtgccacattttcttaatccagtctatcgttgttggacatttgggttggttccaagtctttgctattgtgaataatgccgcaataaacatacgtgtgcatgtgtctttatagcaacatgatttatagtcctttgggtatatacccagtaatgggatggctgggtcaaatggtatttctagttctagatccctgaggaatcgccacactgacttccacaatggttgaactagtttacagtcccaccaacagtgtaaaagtgttcctatttctccacatcctctccagcacctgttgtttcctgactttttaatgattgccattctaactggtgtgagatggtatctcattgtggttttgatttgcatttctctgatggccagtgatgatgagcattttttcatgtgttttttggctgcataaatgtcttcttttgagaagtgtctgttcatgtccttcgcccactttttgatggggttgtttgtttttttcttgtaaatttgtttgagttcattgtagattctggatattagccctttgtcagatgagtaggtggtgaaaattttctctgattccgtaggttgcctattcactctgatggtagtttcttttgctgtgcagaagctctttagtttaattagatcccatttgtcaattttgtcttttattgccattgcttttggtgttttggacatgaagtccttgcccatgcctatgtcctgaatggtaatgcctaggttttcttctagggtttttatggttttaggtctaacgtttaagtctttaatccaacttgaattgatttttgtgtaaggtgtaaggaagggatccagtttcagctttctacatatggctagccagttttcccagcaccatttattaaatagggaatcctttccccattgcttgtttttctcaggtttgtcaaagatcagatagttgtagatatgcggcgttatttctgagggctctgttctgttccattgatctatatctctgttttggtaccagtaccatgctgttttggttactgtagccttgtagtatagtttgaagtcaggtagtgtgatgcctccagctttgttcttttggcttgggattgccttggcgatgcaggctcttttttggttccatatgaactttaaagtagttttttccaattctgtgaagaaagtcactggtagcttgatggggatggcattgaatctgtaaattaccttgggcagtatggccattttcacgatattgattcttcctacccatgagcatggaatgttcttccatttgtttgtatcctcttttatttccttgagcagtggtttgtagttctccttgaagaggtccttcacatcccttgtaagttggattcctaggtattttattctctttgaagcaattgtgaatgggagttcactcatgatttggctctctgtctgttgttggtctataagaatgcttgtgatttttgtacattgattttgtatcctgagagtttgctgaagttgcttatcagcttaaggagattttgggctgagacaatggggttttctagatatacaatcatgtcatctgcaaacagggacaatttgacttcctcttttcctaattgaataccctttatttccttctcctgcctgattgccctggccagaactaccaacactatgttgaataggagtggtgagagagggcatccctgtcttgtgccagttttcaaagggagtgcttccggtttttgcccatttagtatgatattggctgtgggtttgtcatagatagctcttattattttgaaatacgtcccattaatacctaatttattgagagtttttagcatgaagggttcttgaattttgtcaaaggccttttctgcatctattgagataatcctgtggtttttgtctttggctctgtttatatgctggattacatttattgatttgcgtatattgaaccagccttgcatcccagggatgaagcccacttgatcatggtggataagctttttgatgtgctgctggattcggtttgccagtattttattgaggatttttgcatcaatgttcatcaaggatattggtctaaaattctctttttttgttgtgtccctgcccggctttggtatcagaatgatgctggtctcataaaatgagttagggaggattccctctttttctattgattggaatagtttcagaaggaatggtaccagttcctccttgtacctctggtagaattcggctgtgaatccatctggtcctggactctttttggttggtaaactattgattattgccacaatttcagctcctgttattggtctattcagagattcaacttcttcctggcttagtcttgggagagtgtatgtgtcgaggaatgtagccatttcttctagattttctagtttatttgcgtagaggtgtttgtagtattctctgatggtagtttgtatttctgtgggatcggtggtgatagcccctttatcattttttattgtgtctatttgattcttctctctttttttctttattagtcttgctagtggtctatcaattttgttgatcctttcgaaaaaccagctcctggattcattaattttttgaagggtcttttgtgtctctatttccttcagttctgctgtgattttagttatttcttgccttctgctagcttttgaatgtgtttgctcttgcttttctagttcttttaattgtgatgttagggtgtcaattttggatctttcctgctttctcttgtgggcatttagtgctataaatttccctctacacactgctttgaatgtgtcccagagattctggtatgttgtgtctttgttctcgttggtttcaaagaacatctttatttctgccttcatttcgttatgtatccagtagtcgttcaggagcaggttgttcagtttccatgtagttgagcggttttgagtgagattcttaattctgagttctagtttgattgcactgtggtctgagagatagtttgttataatctctgttcttttacatttgctgaggagagcttccaagtatgtggtcaattttggaataggtgtggtgtggtgctgaaaaaaatgtatattctgttgatttggggtggagagttctgtagatgtctattaggtccgcttggtgcaaagctgagttcaattcctgggtatccttgttgactttctgtctcattgatctgtctaatgttgacagtggggtgttaaagtctcccattattattgtgtgggagtctaagtctctttataggtcactcaggacttgctttatgaatctgggtgctcctgtattgggtgcatatatatttaggatagttagctcttcttgttgaattgatccatttaccattatgtaatggccttctttgtctcttttgatctttgttggtttaaagtctgttttatcagagactaggattgtaactcctgcctttttttgttttccatttgcttggtagatcttcctccatccctttattttgagcctgtgtgtgtgtctgcacgtgagatgggtctcctgaatacagcacactgatgggtcttgactctttatccaatttgccagtctgtgtcttttaattggagcatttagtccatttacatttaaagttaatatggttatgtgtgaatttgatcctgtcattatgatgttagtcagttattttgctcattagttgatgtagtttcttcctagtctcgatggtctttacattttggcatgattttgcagcggctggtactgattgttcctttccatgttcagcgcttccttcaggagctcttttagggcaggcctggtggtgacaaaatctctcagcatttgcttgtctgtaaaggattttatttctccttcacttatgaagcttagtttggctggatatgaaattctgggttgaaaattcttttctttaagaatgttgaatattggcccccactctcttctggcttgtagggtttctgctgagagatctgctgttagtctgatgggcttccctttgagggtaacccgacctttctctctggctgcccttaacattttttccttcatttcaactttggtgaatctgacaattatgtgtcttggagttgctcttctcgaggagtatctttgtggcgttctctgtatttcctgaatctgaacattggcctgccttgctagattggggaagttctcctggataatatcctgcagagtgttttccaacttggttccattctccccatcactttcaggtacaccaatcagacgtagatttggtcttttcacatagtcccatatttcttggaggctttgctcgtttctttttattcttttttctctaaacttcccttctcgcttcatttcattcatttcatcttccattgctgataccctttcttccagttgatcgcatcggctcctgaggcttctgcattcttcacgtagttctcgagccttggttttcagctccatcagctcctttaagcacttctctgtattggttattctagttatacattcttctaaatttttttcaaagttttcaacttctttgcctttggtttgaatgtcctcccgtagctcagagtaatttgatcgtctgaagccttcttctctcagctcgtcaaagtcattctccatccagctctgttccgttgctggtgaggaacggcgttcctttggaggaggagaagcgctctgtgttttagagtttcccgtttttctgttctgctttttccccatctttgtggttttatctacctttggtctttgatgatggtgatgtacagatgggtttttggtgtggatgtcctttctgtttgttagttttccttctaacagagaggatcctcagctgcaggtctgttggaataccctgccatgtgaggtgtcagtgtgcccctgctggcgggtgcctgccagttaggctgctcgggggtcagggacccacttgaggaggcagtctgcccgttttcagatctccagctgcgtgctgggagaaccactgctctcttcaaagctgtcagacagggacatttaagtatgcagaggttactgctgtctttttgtttgtctgtgccctgtccccagaggtggagcctacagaggcaggcaggcctccttgagctgtggtgggctccacccagttcgagcatcggggctgctttgtttacctaagcaagcctgggcaatggcgggcgcccctcccccagcctcgctgccgccttgcagtttgatctcagactgctgtgctagcaatcagcgagactccgtgggcataggaccctctgagccaggtgcgggatataatctcgtggtgcaccgttttttaagccagtctgaaaagcgcaatattcgggtgggagtgacccgattttccaggtgagtccgtcacccctttctttgactcggaaagggaactccctgaccccttgcacttcccaagtgaggcaatgccttgccctgcttcggctcgtgcaaacccactgacctgcgcccactgtctggcactccctagtgagatgaacccggtacctcagatggaaatgcagaaatcacccatcttctgcgtcgctcacgctgggagctatagaccggagctgttcctattcggccatcttggctcctccttcgccacattttcttaatccagtctatcgttgttggacatttgggttggttccaagtctttgctattgtgaatagtgccacaataaacatacgtgcgcatgggtctttatagcagcatgatttataatcctttgggtatatacccaataatgggattgctgggtcaaatggtatttctagttctagatccctgaggaatcgccacactgacttccacaatggttgaactagtttacagtcccaccaccagtgtaaaagtgttcctgtttctccacatcctctctagcacctgttgtttcctgatttttaatgattggcattctcactggtgtaagatggtatctcattgtgattttgatttgcatttctctgatggccagtgatgatgagcattttttcatgtgtctgttggctgcataaatgtcttcttttgagaagtgtctgttcatatcctttgcccacttgttgatggggttgtttgtctttttcttgtaaatttgtttgagttcattgtagattctggatattagccctttgtcagatgagtagattgcaaaaattttctcccattctataggttggctgttcactctgatggtagtttcttttgctgtgcagaagctctttagtttaattagatcccatttgtcaattttgtcttttattgccattgcttttggtgttttggacatgaagtccttgcccatgcctatgtcctgaatggtaatgcctaggttttcttctagggtttttatggttttaggtctaacgtttaagtctttaatccaacttgaattgatttttgtgtaaggtgtaaggaagggatccagtttcagctttctacatatggctagccagttttcccagcaccatttattaaatagggaatcctttccccattgcttgtttttctcaggtttgtcaaagatcagatagttgtagatatgcggcgttatttctgagggctctgttctgttccattgatctatatctctgttttggtaccagtaccatgctgttttggttactgtagccttgtagtatagtttgaagtcaggtagtgtgatgcctccagctttgttcttttggcttgggattgccttggcgatgcaggctcttttttggttccatatgaactttaaagtagttttttccaattctgtgaagaaagtcattggtagcttgatggggatggcattgaatctgtaaattaccttgggcagtatggccattttcacgatattgattcttcctacccatgagcatggaatgttcttccatttgtttgtatcctcttttatttccttgagcagtggtttgtagttctccttgaagaggtccttcacatcccttgtaagttggattcctaggtattttattctctttgaagcaattgtgaatgggagttcactcatgatttggctctctgtctgttgttggtctataagaatgcttgtgatttttgcacattgattttgtatcgtgagactttgctgaagttgcttatcagcttaaggagattttgggctgagacagtggggttttctagatatacaatcatgtcatctgcaaacagggataatttgacttcctcttttcctaattgaataccctttatttccttctcctgcctgattgccctggccagaacttccaacactatgttgaataggagtggtgagagagggcatccctgtcttgtgccagttttcaaagggagtgcttccggtttttgcccattcagtatgatattggctgtgggtttgtcatagatagctcttattattttgaaatacgtcccatgaatacctaatatattgagagtttttagcatgaagtgttcttgaattttgtcaaaggccttttctgcatctattgtaataatcatgtggtttttgtcgttggttctgtttatatgctggattatgtttattgatttgtgtatgttgaaccagccttgcatcccagggatgaagcccacttgatcatggtggataagctttttgatgtgctgctggattcagtttgccagtattttattgaggatttttgcatcgatgttcatcagggatattggtctaaaattctctttttttgttgtgtctctgcccggctttggtatcaggatgatgctggcctcacaaaatgagttagggaggacttcctcttttctattgattggaatagtttcagaaggaatggtaacagctcctccttgtacctctggtagaattcggctgtgaatccatctggtcctggaccgtttttggttggtaagctattaattattgcctcaatttcagagcctatcattggtctattcagagattcagcttcctggtttagtcttgggagggtgtatgtgtccaggaacttatccatttcttctagattttctagtttatttgcatagaggtgtttatagtattctctgatggtagtttgtatttctgtgggttcagttgtgatatcccctttatcatttttttttgcatctatttgattcttctctcttttcttctttgttagtcttgctagcggtctatcaatcagttttgttgatcttttcaaaaaaccagctcctggattcattgattttttgaagggttttttgtgtctctatttccttcagttcttctctgatcttagttatttcttgccttctgctagcttttgaatgtgtttgctcttgcttctctagttcttttaattgtgatgttagggtgtcaattttagatctttcctgctttttaaaaaaaatatgaatgcctgagcctcatcccccaagattctgatttagtgtgcctgatttaatggggttgggtcttggcattgggatttttcagagctgcccagaagattccaaaatgaattcaagactgagcaccactgccttaaaggcaccaccagacagttacctatcattcctgcatcatctcaaatgtgcttctccactcactagttgttggtaactcttataggtgtgtttccgagaaggaaactgtcaaagaaccctggagttaagaagggcaggctctctggaaaaggtgagactccagggagcctttgaaggactaaagtttctcttaggacaggagggctgtaaagcagtagagccaaagacctggagcccccacatcctgtctgccagatgaaatcctgcttccctttaagggaggaggcatgataaaacattttgtttttctttttctctcccaaaatctgcttgtgtaaaaaataaaaaagaaactgcttcgggaaaaaaaattgctttagaagcctaatctattgcttgagaaaatagtagcatctctatattttaagtggtgagtttatgagacaaattcttttttggaggaccaatgaaagagattgaaaatataattgaaattccaagcagattttgggagagaaaaagaaaaacaaaacaaaacaaccctaaaggcaggcctgagaaaagttctggcagactgagaaaacaaagatttagatgaatcagcctagaaagatggaagttcattccttctgtgctgcccgaggatgatagcacagaggcagaatgtcctcttgtacattgtcagaatttttcaagtttctgtggcgtttacactcagcagaatgagaagtagaaccagagatccttctcctcaccataccacacctgccttagaatcttgaaaaggcacatttgacattccttctgttgaactgccaccttcactttgggatcccttcagggcagcctgttctctccaggtcttcatttctttgactttcctgaaaacaaatgggaggcccagtctcctactttcccttctcaagtcatccttggggacttatcctcaatgatcagaatggctgtgcaagctgtggaccatggaaatccaagctggtaataagactgctactgctggtgggattttcaggcccagtaggagcctccttcctaatctctccagaccaaggcctggccccaccccaccccactttgcccagggtatccccattaaataaagaaggtagatttcaagctggccctaaagattcatcttttagtctctaagtgcctcaaaatggccagctttgattccagggcttctaattccaggccctggaagtttttccttcagcattggccatgttccctctgtcctgtggggttccctgcagcatgtttgatgattgttaaagttggttttaccagtgaatacagtctccattcctgcctgctttttctctcgtgctactgaattttaagtaggacagagttacccaggatctttttcctcatgtctttgaaaacaaccaaaaagctgaacataaaaatggacaatggccatttttaagttgatcagtgtccatcgccagacaaatggttaaagaaaatgtagtacatatacacaatggagtactattcagccataaaaagaatgagatcctgtcatttgcaacaacatgaatggaaccgagagacattaagtgaaacaagccagacacagaaagacaaactttgcatgttctaatttgtgagagctaaaaaattaaaacaattgaactcatggagatagagagtagaatgatggataccagaggctgggaagggtagtcaggggggtgagaagtggggatggttaatgagtgtaaaaatgtagttagttagaaagaatgaataagatctatttgatagcacaacagggtgattacagtccacaataatttattgtatatttaaaaataactaaaagagtataattggattgtttgtcacataaaagaaaggataaatgcttgaggtgatggatatcccatttaccctgatataattattacccattgtatgcctatatcaaaatatgccatgtatcctataaatatatatacccacacaaaatgtatgtacccacacaaaaaaaatcagattggaggattccatttatataaagtccacaaacaggcacaacaggtctatgctggtggaaataagaaagtggttggctctgtgatggaggggaggggtggtggagagtgagaaaggaatgtgttgaattgactggaaaagatcatcaggaagctttccagagggtcagaaatgttctagatcttattgagtgatgggtacatgacacatacagttgtcaaaacttattgatctgaatacttaagatctgtgcattttatgatacgtaaattacaccttgtggcaggcagcctgtacaatgatccctgattcctggcactcacactcttgtggaattccctctcctggattgtgtgctgaacctagcgactccctttcaacaaatagatacagcaaaagtgaggcattgtcacttctgagatgaggttacaaaggctgtggctgtcaggtgctctcttgcccttcttgcctcgcttgctccctattgtgaactgctgtatgtagaggcccgcatggcaaggaactgatgactctgaccaacagccagcaagaacttgagacctgacagcagctacatgagtgagtttgaaagcagctcttcccccagctgagccttgagaggaaaccacagtccctcctggtattttgattgtagccttgaatgagaccctgagccagagacacccagtgaggctatgcctggattctcaacccacagagactatgagataataaatagttgttgctttaagccactgcattttagggtaatttaatttattctaaggcaatacataactaatgcaccaatgaaatctggtctgtatttaaaatttgcaatgctcattaaaaaggaagtgaagcacagtgcctagtagcatatgcttctgttcttttccttgcccagaggatcttctctgaccatttgcaacaacatgagtggaactcagttgccccacccaattctttccctggaaagccttcttacagaataacagttttataatattacaatgactaggatatactcatagaccttctccaaggcatgggaagagagattctccacattgtcttatgggagcactcctagctctgagctgctaatggaattcaaacatcctgacacctggcatggagagaggtgggaggaagctctgttggacgtatggatggtctcactcagatggttggtctttgcccacaagtcctccctcatgtctccacctccctcggctggtgaaggtagagagagatgcagcctccttggccagcatcacctttgctggaaggacaatgcacagaatgtgaactgtggaaccacatggacctgagttcaaatctcaggttcacttttatgagctgggtgacctttagtggatcatgaatcctctctgaggctcttggggatctcatctatgaaattaagagaactctcaccttgaggagttattgtaagaattaaagacatgcaccaacatggatgaatctaatatgcattatactaagggaaagaaggcagactcaaaaggctacattacatgacattctggaaaaggcaaaactatagtaacagaaaacagatcagtgcaggtgagaggtgggaagaggggtggactacaatggccacaaaataatttttagggcaatggaactgttctgtatcttgattacagtgatggctacagaaatgtatgtatttgtccaaaaatcacagaactatacactaaaaaggttgaattttgcagtatgtaaattatacctcaataaacctgcttttaaaattaatggaaggatgtaaaaggtgcagactcagtaactctctcagtctggctcaccaagacagacagctgtacaggcttagtcacagctctgagcttgctgaggtagtcaaggtcttagtcacactctgagctccctgagttagtgagggtcttataagccaagattgtttttcccataaccctccctcctcagcctctaagactgtctgccaactcctccctgcctggggggacttgttgctttagggtaaacagactcagccccaggagccaggctaggtatgaccaagtatagcatccaggcagctcagagccaccatgaccatccatacctattgaaacaaaagtaatgttctgcctattcttcaagatcccatcagttaacaagggaaccttaagagtcagtcattttcatcagccatcagcatctatgaaaatacgtatttttttactccaagccagaaaatatgatgtttgcacaactgcagagcagtggcctgggaatcaaacgtgaatgtcatatgtaacctaataaacaaagtttgtatgtatatttgtaacaaaacaaagttatgtattcccctctcccttgcaccagggaggtaaggaggtggaattgtgagtttttaatcaagcaagcaaatgagaaataaatagaatatggcaatggtgcctattaatcaccctaaaatttccacggggatgggcccagccagaagctttcatttctatggaaaccacaaaggcagtttggacaaaagaaaatgaaaccagggcaaggaagggctgggtaaggctaaattctaagattggtctgatgaaaggcttaggagttttcaaagcttgggcaaagccttgtgtcatccagcactggcaaaggcatctcagcctgggcatgggtgagtagcctagatgtcccaacttatttaggcctgaggactgctaaggaaacccagggaggcttgtatgagtagtatacagtgaaagcacagtaggagaaaagaaaaaatggcagggaagaatgtgcacccaattacgggtatcaggaagtagtttctgacacccataattgggatggcacccctcctttgcagtcccaagggtgccctgcacttgtctccatggtaacacagacaactttatagtaacagcctgcttacttgtctccaccaccagattccttattaagaatagggtgtacagaattcattattgtattaaccgaacctagctcagggctcagcctctaaaacaactacagtcatgcttgatgatgggaacgtgttctgagaaatgcattgttgggtggctttgtcattatgtgaacatcatagtgtgcacttaccaaacctagatggtatagcctactattaggttggtgcaaaagtaatttcggtttttgccattaaaagtaatgtattcctaggatatatgggatagcctattgctcctaggctacaaatctgtacagcatgtcactgtactgaatactgtaggcaagcataacacaatggtaaatatttgtgtatctaaacgcatctaaacataaaaaatacagtataaaagattaaaaatggcatagctgtgtctataaaatgcttaccatgaatgaagcttgcatgactaggtgttgctctgagtgggtcagtgagtgagtggtgagtgaatgtgaaggccaagacattactgtacactactgcagactttataaacatggtacacttaggctacactaaatttatttttaaaaatttctttctttaataacatattaaccttaacttactgtaacttcattacaaacttctaaatttaagttttaaacattttggcttttttataataacactagcttaaaataaaacacatagtatagctgtacaaaaatattttctttctggccgagcacagtggctcatgcctgtaatcccaacaatttgggaggctgaggtgtgtggatcaatttgaggcaggagttcaagaccagcctggctaacatggtaaaaccccatctctattaaaaatacagaaaactagccgcgtgtcgtggcacacgtgtgtaatcccagctacttgagaggctgaggttcaagaattgcttgatcctgggaggtggaggttgcagcgaaccaagattgagccactgcactccagcctgggcaacagagcaagactgtctcaaaaaattttttttctttctttatttccttattctataagctgttttctatttcaagttttttgcttgtttgtttttattttttaaacttctttgttaaaaactagcccacaggctgggcacagtggctcacgcctgtaatctcaacactgtgggaggccgaggcaggtggatcacgatgtcaagagatcgagactatcctggctaacacggcgaaaccccatctgtactaagcatacaaaacattagccaggcgtggtggtgggtgcctgtaatctcagctactcaggaggctgaggcaggagaatggcatgaacccgggaggcagaggttgcagtgagctgagatcatgccactgcactccagcctgggcgaaagagcgagactccatcaaaaaaaaaaaaaaaaaaaaaaacctagcccacaaacacacacattagcttaggcctacacgtcactgtcatccacctccacatcttgtcccactggaagttcttcagaggcagtaacatgcatggggctgtcatctcttatgataacaatgccttcttctgaaatgttccctgaaggacctgcctgaggttgttttacagttaactttttaaatatatacaagtagaaggagtatactctaaaatcacaattaaaagttaatacagaaaccactaagaggaggttccaagatggccaaataggaatagctccagtctgcagctcccagcatgagcgacgcagaagacaggtgatttctgcatttccaactgaggtactggattcatctcgctggggcttgtcagacagtgggtgcagcccacgtagcagggtggggcatcacctcacctgggaagcacaagaggtcagggaattccctttcctagcaaagagaagccatgacagacagtacctggaaaattggtacactcccaccctaatactgtgcttttccagtggtcttagcaaacggcacaccaggagattatatcccacgcttggctcggagtgtcccacacccacggagccttgctcactgctagcacagcagtctgaaatcaaactgcaaggcagcagcgtggctgggggaggggcatccaccattgctgaggcttgagtaggcaaacaaagtggccaggaagcttgaactgggtggagcccacggcagcagaggaggcctgcctgcctctgtagactccacctctgggggcagggcatagctgaacaaaaggcagcagaaacttctgcagacttaaacatccctgtctacagctctgaagagagtagtggttctcccagcacagagtttgagatctgagaaccgatagactgcctcctcaagtgggtgcctgacccccgagtagcctaactgggagacacctcccagtaggggctgactgacacctcacacagccgggtgcccctctgagacgaagctttcagaggaaggctcaggcagcaacatttgccattctggaatatttgctgttctgcagcctctgctagtgatacacaggcaaacagggtctggagtggacctccagcaaacaccaagacacctgcagctgagggtcctgactgttagaaggaaaactaacaaacagaaaggacatccacaccaaaaccccatctgtacgtcaccatcatcaaagaccaaagatagataaaagcacaaagatggggagaaaccggagcagaaaacctgaaaattctaaaaatcagagcgcctctcctcctccaaaggaacgcaactcctcgccagcaatggaacaaagctggacggagaatgactttgacgagttgagagaagaagccttgagacaataaataataacaaacttctccgagctaaaggaggatgttcaaacccatcgcaaagaagctaaaaaccttgaaaaaagattagacgaatggctaactagaataaacagtgtagagaagtccttaaatgacctgatggagctgaaaaccatggcaggagaactacgtgatgcatgcacaagcttcagtagccaatttgatcaactggaaggaagggtatcagcgattgaagatcagatgaatgaagtgaagggagaagagaagtttagagaaaaaagaagcaaataaagcctccaaaaaatatgggactgtgtgaaaagaccaaacctacgtctgactggtgtacctgaaagtgacagggagaatggaaccaagctagaaaacactcttcaggatattatccaggagaacttccccaacctagcgaggcaggccaacattcaaattcaggaaacacagagaacgccacaaagacactcctcaagaagagcaactccaagacacatcattgtcagattcaccaaagttgaaatgaaggaaaaaaatgttaagggcagccagagagaaaggttggattacccacaaagggaagcacatcagactgacagctgatttctcggcagaaactctacaagtcagaagagagtgggggccaatattcaacattcttaaaggaaagaattttcaacccagaaattaatatccagccaaactaagcttcataagtgaaagagaaataaaatcctttacagacaagcaaatgctgagagattttgtcaccaccaggcctgccctaaaagagctcctgaaggaagcactaaacatggaaaggaacaaccagtaccagccaatgcaaaaacatgccaaattgtaaagaccatcgaggctaggaagaaactacatcaactaatgagcaaaataactggctaacatcataatgactgcatcaaattcacacataacaatattaaccttaaatgtaaatgggctaaatgctccaattaaaagacacagactggcaaattggataaagagtcaagacccatcagtgtgctgtattcaggagacccatctcacgtgcagacacacacacaggctcaaaataaagggatggaggaagatctaccaagcaaatggaaaacaaaaaaaggcaggagttacaatcctagtctctgataaaacagactttaaaccaacaaagatcaaaagagacaaagaaggccattacataatggtaaatggatcaattcaacaagaagagctaactatcctaaatatatatgcacccaatacaggagcacccagattcaataagtccttaaagacctacaaagagacttagactcccacacaataataatgggagactttaacaccacactgtcaacattagacagatcaacgagacagaaagttaacaaggatacccaggaattgaactcagctctgcaccaagcagacctaatagacatctacagaactctccaccccaaatcaacagaatatacattcttctcagcaccacatcacacttattccaaaactgaccacatagttggaagtaaagcactcctcagcaaatgtaaaaaagaacagaaattataacaaactgtctctcagaccacagtgcaatcaaactagaactcaggattaagaatctcactcaaaaccgctcaactacatggaaactgaacaacctgctcctgaatgactactgggtacataacgaaatgaaggcagaaataaagatgttctttgaaaccaatgagaacaaagacacaacataccagaatctctgggacacatttaaagcagtgtgtagagggaaatttatagcactaaatgcccacaagggaaagcaagaaagatctgaaattgacaccctaacatcacaattaaaacaactagagaagcaagagcaaacacattccaaagctagctgaaggcaagaaataactaagatcagagcagaactgatggagatagagacataaaaaacccttcaaaaaagcaatgaatccaggagctggttttttgaaaagatcaacaaaattgacagaccgctagcaagactaataaagaagaaaagagagaagaatcaaatagacacaataaaaaatgataaaggggatatcaccaccagtcccacagaaatacaaactaccatcagatactataaacacctctacacaaataaactagaaaatctagaagaaatggataaattcctcaacacatacaccctccccagactaaaccaggaagaaattgaatccctgaatagaccaataacaggttctgaaattgaggcaggaattaatagcctaccaaccaaaaagagtccagaacgagatggattcactgccaaattctaccagaggtacaaagaggagctggtaccattccttctgaaactattccaatcaatggaaaaagagggaatcctccctaattcattttatgaggccaacattatcctgacaccaaagcctggcagagacacaacaaaaaaagagaattttagacccatatccctgatgaacatcaaagcaaaaatcctcaataaaatactagcaaaccaaatccagtagcacatcaaaatgcttatccaccacaattaagttggcttcatcccagggatgcaaggctggttcaacatatgcaaatcaataaacgtaatccaacatataaacagaaccaaagacaaaaaccacatgattatctcaatagatgcagaaaaggcctttgacaaaattcaacatcccttcatgctaaaactctcaataaactacgtattgatgagacatatctcaaaataataagagctatctatgacaaacccacagccaatatcatactcaatgggcaaaaactggaagcattccctttgaaaactggcacaagacagggatgtcctctctctccacttctactcaacatagtgttggaagttctggccagggcactcaggcaggaggaaataaagggtattcaattaggaaaagaagaagtcaaatggtcctgtttgcagatcacatgattgtatatctagaacaccccatcgtctcagccccaaatctccttaagctgataagcaacttcagcaaagtctcagaatacaaaatcaatgtgcaaacatcataagcattcctatacaccaataacagacaaacagagagccaaatcatgagtgaactcccattcacaattgcttcaaagagaataaaatacctaggaatccaacttacaagggatgtgaaggacctcttcaacgaaataaaagaggacacaaacaaatggaagaatattccatgctcatggataggaagaatcaatatcgtgaaaatggtcatactgcccaaggtaatttatagattcaatgccatccccatcaacctaccaaagactttcttcacagaattggaaaaaactactttaaagttcatatggaaccaaaaaagagcgcatattgccaagacaatcctaagtgaaaagaacaaagctggaggcatcacactacctgacttcaaactacactacaaggctacagtaaccaaaacagcatagtactggtaaccaaaacagtaccaaaacagctgttttggtacagtaaccaaaacagcatggtactgttccataaaccaatggaacagaatagagccctaggaaataataccacacatctacaaccatctgatctttgacaaacctgacaaaaacaagaaatggggaaaggattccctatttaataaatggtgctgggaaaactggctagccatatgtagaaagctgaaactggatcccttgcttacaccttatacaaaaattaattcgagatggattaaagacttaaatgttagacctaaaaccataaaaaccctagaagaaaacctaggcaataccattcaggccataggcatgggcagggacttcatgactaaaacaccaaaagcaatggcaacaaaagccaaaattgacaaatgggatctaattaaactcaagagcttctgcacagcaaaagaaactaccatcagagtgaacaggcaatctacagaatgggagaaaatttttacaatctacccatctgacaaagggctaatatccagagtctacaaagaacttaaacaaatttgcaagaaaaaatcaaacagccccatcaacaagtgggcaaaagatatgaacagacacttctcaaaagaagacatttatgcagccaacagacacatgagaaaatgctcatgatcagtggtcatcagagaaatgcaaatcaaaaccacaatgagatactgtctcatgccagttagaatgatgattattaaaaagtcaggaaacaacaggtgctggagaggatgtggagaaataggaacgcttttacactgttggtgggactgtaaactagttcgaccattgtggtagacagtgtggcaattcctcaaggatctagaactagaaacaccattagacccagcaatcccattagtgggcatatacccaaaggattaaaatcatgctgctataaagacatgcacacgtatgtttattgtggcactattcacaatagcaaagacttgaaaccaactgaaatgtccattaatgatagactggattaagaaaatgtggcacatatacaccatggaatactatgcagccataaaaaaggatgagttcatgtcctttgtagggacatggatgaagctggaaactatcattctcagcaaactatagcaaggacagaaaaccaaacactgcctgttctcactcataggtgggaattgaacagtgaaaacacttggacacagggtggggatcatcacacatcagggcctgtcatagggtgggtgaaggggggagggatagcattaggagacacacctaatgtaaatgacgagttaacgggtgcagcacaccaacatggcacatgtatacatatgtaacaaacctgcacattgtgcacatgtaccttagaacttaaagtataatttaaaaaaaagaaaccagtaacatatagtaaatacataaagcagaaacatagtcatttatcaagtattatgtgctgtacataattgtatgtgctatacttttatatgagtgacagcacagatttgtttacaccagcatcaccacaaacacgcaagtaatgggttgcactacaacattaagatgactatgatgtcactaggcatcaggaatttttcagcctcattataatcttatgggactactgtcatatatgcagtccattattgacctaaacatcctgtgtgacatcatgactgtactacaacaggaatagctaacccttatataacaacaaaaactaatgcatactgtacttatagtgtgtcagggacataaaatgtttacatatgttacatttctaaattctcattgttaatattatacatattttatggatgaggaaactgaggcggagagaattcaagatgtttgcccaagaccacattgctaataagtggcagagctaaatatataattaaattactgtaatttaatttaattacagtgaattaccctagcagtaccctactgccctatctatattccccccacaccccccaacacacaaggtccagaagtccctcccctactaccttctccactgaagggtacaattgatcagaaacattatgtccagctccccactctcctgtctctccatctcctcaaaggcccactaaaacttctgcattaaaaatgaaatcagatatacagaacaacttcacaaggaagacaggttagcaaagccatgattttaatttcctctgccacatagaaccttttcttagttaattcaaaacaatccagtccttattggcatcttgtatttttaaaaattgattgtcagtgcctcaggtcccatcggctaaaatgataaaagaatttccaaatgagattcaaattattaatgcctgatagaaaggtcccctgatgcctaagcagcctctcatattacttttcttgttagcctctcccaccaggagaaaatacttttgagaataaatgttaaagaatccagataagtgacagaaatattccactcatccatgcctaaccatcagcttcttccccagcattccttgacataaaaatttctggattgggctcatccatattttataagtcataagcccaaactacataaactcagaatagtttgttggtgactggcctgtgtacttttctggaagaaaaaaggtggcttacatttaatgcagcaggctttcattgtgagcccactataagccatgaacagtaccaggggcaggggcagaaaaaagacagatcagcaaagttatgattttaatttcctctgccacataggaccttgtcttaattaattcaaaacacctcccatgtgctttgtcccatgtgctttctatgtgcgtataacttaaagagatagatacaccaaaataatggtgaaaaaatacgtattaacagtaaggacaaagcaaagaaataattctgctctgggaagtacagggagacaaaggagtttgggaaatgtttgtagcattaaaattccctgaattgagacctcaagagtgaggatcagtcccctgcaatcatcaaactgaaaattttttaccaattggagtggtgaaaatatgtggttattttaaagtatatttctctgattataaactagtgaaggtcaacatcttttcatgtttacgtggccatttggttttcctttgtgaattccccaattttctattctattgaatttttaaaaattattatttatttgaaagagtttgttagtaaatgtattgaaaacaattactaggtcggtttttgaatttccttttctttatagtgctctttgccacagaggtgtttcaattttttttttttttttttttttctgagacagagtcttgctctgtagcccaggctggagtgcagtgacatgatctcgactcactgcaacctccgcctcctgggttcaagcgattctcctgcctcagcctcccaagtagctaggaccacaggcatgctccaccatgcccagctaattttttgtatttttagtagagacaggtttcaccatgttagccgggatggtctcgatctcctgacctcgtgatccacccgcctcagcctcccaaagtgctgggattataggtgtgagccaccgcacccagcccaggtgtttcaattttaatgtcatcagatttagcaattctttcttttatggtgtataccttctgtggcttatcaaaactctatccatactctggtgtgataaagatgttctcctatatgtttttttattactgcttctgaaattccatttttattaagtatagcaagacattatttgcatagctataaggtggaaaatgttgtcaattctactgctattcactgtcccttgcacaaatccttaaacctcttacttctcactgtctcttactcccttagctaaatcaaaatctggttaaataaaaatttttgcttccatggtatcttcacatgcagagttgacgaatgctgaagaaaaactcaatcatgatgactggtaacctcttaaacctgaacactgactacacgattccataatattgtcttacaattataccatagtctcttcctccatccactcttcttctaaaagaccatttcttctctctaatcgaacatttaacatggccttcctggacctcactttttaaaatatggttaaaaaaccaggtaacattaaacttattattaaccatttttaaatgcacaactcactagcgttaagtatagttctattgttgggcaacaaatctatggaagctcttcatttgcaacactaaaattgcatacccactaaactctaattcctcctctctccatcccttggtaaccacctttctactttctggttctatgatttcgactactctattttttaaaaattttgtttataattgacatacaataattgtacaggtttatggtgtacagtgtgatgtttcaatatatggatacattatataatggtcaaattaggatagttagcatgtccttcacctcataccgttatcatttctttgtggtgataactttcaagatcctttttcctagctatcttaaaatatacaatacattgctcttaactatagtcatcctactatgtaatggaacaccaaaattattcttcccatctgactataattttgtactcattggctgagtttcctctcttccccttatccctcacctcctcagtctctgataactactattctgctctatacttctatgagctcaactttcctagattccacatataagtgagagaatgcagtatttgtctttctgcacctggcttattttacttaacattgtgtcctccaggttcattgattttgctacaaatgacaggattgcattcctttttatagctgaatagtattccattgtgtacttatactacattttctttatttgtttatctgttgatgtacacacaggttgacttcatatcttggctactatgaatagtgtttaaataaacataggaatgcagatatctttttaatatacttacttaattcctttggctatatacccagtagttgaattggtggatcttttggtagttccaggcaagaacatactgtttttcataatggctgaactaatctacactaccaccaacagtgtatgagttccctttctttgcatccttaccagcgtttgttaatttttgtctttttgattatagccattctaactggggtaagaggtcagatctcattgtggttttagtttgcatttctctgatgattagtgatattgagcatcttattatatacctgcatgtatttttttgataaatgtttattcaggtcttttgcccatttaaaaaattagattatgtgtttttgttttttgttgtttttgctattgagttgagttccttatatattgtggatattaatttattgtctggtgcatagtctgcaaatattttctcccattttctaggtgtctcttcactctgttgattgtttcctttgctgtgcagaagttatgtgatcccatccatccattttagcctcggttgcctgtgcttttagggtattattcaagaaacctttgctcagactaatgtcctggagagtttcccaaatgttttcttatggtagtttcataatttggggtctaagatttaaatcttttattcatttttatttttgtatatgagatggggttctagtttcattcttctgcatatggatatccagttttcccatcaccatttattgaagatactgtcctttcccccagtgtatgttcctggcacctttgtcaaaaatgagttccctgtagatgtgtggatttatttctggattttctcttatattccattggtctatgtgtctgtgttatgcccataccctgccattttagttactatagctttgtagtataatctgcttctgccaactttgttcttttgctcaggatagctttagctattctgggtcttttgtggttccatataaattttagaatttttttttctacttctgtgaagaatgtcattgcaattttgatagggattgcattgagtctgtagattgctttggatagtatggacattttagtgatattaattattccaattcatgaacatgggatgtatttccatttttgtgtgtctccttcaatttctttcatcagtattttgtagtttccattgaagatgtatttcacctcttttgttaaacttatttctaggtattttattttttgtagctattgtaaataggattgctttcttgatttatttttcctcaagtttgttattggctgatagactgctaattattatatgttgattttgtatcctgtagctttactgaattcatttattagttctaatagtctttggtgaagtctttgggattttctatatatatgatcattttctctgcaaaaagaaacaatttgatttcctccttcccaatttggatgccctttatttctttctcttttctaattgctcttccaaagacttctggtactatgttgaataacagtggtaaaacagggcattcttattccagatcttagagaaaaagctttcaatttttcaccattcagtatgatgttagctgtgggtttgtcatatatgacctttattgtgttgagatatgttatttctatacctaatttgttagagtttttatcatgaagcagtgttgaactcttctctgcatctattgaaatggcaatataatttgtgtccttcattctgttgatatgatgtaccatgtttatagatttgcatatgttgaaccattcttgcattcctggaatgaatcccacttgattatgatgatctttttaatgtgttgttggattttgtttgctagtattttgttgagaatatttacatctacgttcatcaggaatattggcctgttgttttcctttttgtggtggcctgtctggttttgatttcaggacagtgctggtgctgtataatgagtttgaaagtatttcttcctcttcaattttttagaagagtttgagaagaataggtattagttcttttttttttttttttttttgagacggagtctcgctctgttgcccaggctggagtgcagtggcgcgatctcggcttgctgcaagctccgcctcccaggttcatgccattctcctgcctcagcctcccaagtagctgggactacaggcctaccactacgcctggctaattttggttttgtatttttagtagagatggggtttcaccatgttagccaggatggtctcgatctcctgaccttgtgatccacccgcctcagcctcccaaagtgctgggattacaggtgtgagccaccacacccagccagttcttcttttaaaagtttggtagaattcagccatgaagtcatcaggtcttgggcttttctttgatgaaggagtctttattactgctctaatcttgttactcattattggtccactcaggttttgtatttcttcatggttcaaacttagaggttgtatgtgtccaggaatatatccatatcttctagattttttcaatttgtttgtgtatagttgttcatcatagtcttatgatcctttgcatttctgtagtttctgttgtaatgcctactttttcacctctgattttgagtcttctctctttttttcttagtcttcctaaaggtttgttgattttttaatcttttcaaaaacccactctttgtcttgttaaccttttgtattgttctttaaatctctattttatttctgctctgatctttgttatttctttctttctactgatcgttgatttcatttattcatgtttttctaattccttgaagtgtaacattagattatttgagacatttctatttttttgatttaggtgtttattgctataaacctccctcttagcattgcttttgctgtgtcccttaggttttggtatgttgtgtatatttaattggagaatttaatccatttacattcaagtttattactgaaaggtaagggtttactactgccattttgttacttgttttctggttgttttgtagatcctttttttcttttctcctctcttattatcttcttttgtggttaagtgattttcctttagtattatgttttgatttcatgctatttatttttactctatctattacagggttttgatttatgagtaccatgaggcttattttaaaacatcttatagttataacagattattttaaactgataacttaactttgatcacaaaaaattaacaaaaataaactatgctttaacaccattcccccccacacacaaattttgactttttgatattttgatttacatctttttgtattgcctatctctttaccaattgtcatgattattattattttctttaatagttttgtcttgtagtctttatacttaagatataagtaagttacatatcacagttaaagtattattctgaatttttctatattcttacttttaccactgagttttttataccttcaaatgttttctttttgcacattagcattatttcctttcagctgcaagccatattggggcttcatttaatatgatatgtttcttttcttctgctgctttcaattttcttttttgtcccagatttttgataatttgattatgatgtgccttaaagaatttctttttggattgaatttgattggtgacctctgagattcctgtacttggataatgtctttcttcaaatttgggaaattttcagccattatttctataaatatgctgtctaggcctttttctctattgtctcattcaggaactcctgttaagcaaaagttggttcacttggtggtgtcccataattcttatgggccttcttcactcttttttattcattttctctttgcctctctgattggcaatttcatgttctgtcttcaggctcactgattctttcctcagtatgaaccagtttgctgttaaaactttttaatgtgttttaaaattcagttattgaattatttatttataggatttctgtttataaaaaacaaaatttttgtcaattttcttcctggattgttttccatatttcatttagctttttattcatattatcttgtgagtccttgaacttctttaagagcaatgttctgaattctttgttagacacttcatagctcttcagttcttttttgtctattacaagagctttgttggtttcttttggtggtgtcagatttatttgagttttcacaattcttgcatctttacactgatgcccatgcacttgaggagacagccaccacttccagcttttgcaggtgttctctggtggtgttagacctttactacttaatattggaacttaattgctgacctgctattgctccttattttaggaaggacttacaataagcactggaactaaaacactgcattggaactaactcattgcttgcctggtctggggaagactcccagtgagcaccagaacttaagcaccagaactatatcactgccctaccattgttttctagtcttaagaagacttaaataagcaccagaacctaattgtttccaggtcagaagaaggcttcatgaaagcacctgggctttgtggggaatctggccagggatttcgatcttcctgtggattgtttcccttatagtgctctggcagcagtcagtctcctcagcatggtgtcccctttgatttaagctcagagaagccaccaagatttgcatgccagttgctgtgatcagtgcccctactttttgtccccaattcaccccaggtggttcagccttcttggtactctcagtgttttctgtgagatggaactggagttggcttcccaagaagattcccagactggtggggatattaacgtccacctccagttttctcctaccacctcagaaaccttgggtttaggaaaatttttcgtgagtggcgttgtgccagcttgaggtaggggttagtccagtctaaaatgactgttccccttactagttgaagcatttcttgattctgtgggtccaggtggcttttccactcccctccccaatatatggtgaatttagggtagtattcttctctttgagtagtttttagttgtactttggtaggagaatgatgctgaaggaacttctactctgccatcttgctggtgtcactctctcgtctgattttgtctactatacttcatataagtgaaatcatatagtgtttgttattttgtgactggcttctttctcctagcatgccctagatattcactcatgttgtagtatgtgatagaatttccttcattttttaggctggataatattccattgtgtatatataccacattttcttcatctatgcattcagtagtggacatttgggttccttgcacctcttggctattgcaaataatgctacaatgaacatgggtgtgcaagtatctctttgagatccggctttgaattattatggatatatactaaaaaaatgggattgctggatcatgtgataattctattttcaatttttaaggaacccccttcctgtttttcataatagctgcaccattttgcattcccatcaacagttcacatgggttccaatctctccacgtcttcaccaaaagttgttattttccgttcttttgatagcagccatcttgatgggtttgaagtgatatctcactgtgtcttttatttgcattttcctaattattagtgatactgagcattttttatgtgcttattggtcatttgtatatcttctttagagaaatgtctatccaagtcctttgccatattttaattgggttatttggcattttgttatcattattaagttgtagatgttccttaaatagtttgaatattaacaccttgtcagctatgtgatttgcaattattttcttccattctctccttttcccactggcatttcactctgctgattgtttcctttcccactgagaagtttaaagttttgcataatctctttttaaaaatttgttgtctatgtatgcttttgatgttacatccaataaattattgccatatccaacatcctgaaagtttttaccttttttctcctaggagtttaataattttaagtattaaatttaaatacttaatccattcttagttacattttgtatatgatgtaaggtaaggatttgacttcattcttttgcttgtgaatattcagtttttacaacaatatttgttgaagagactgttatttatctattatgtagtcttggcacactggtcaaaaatcatttcgtcatatagcagtggtttatttatgagctacctattctgctccatttatttatatatctatctttatcccaataccacattgtcttaattactattggctttgagatatgttttgaaataaggaagtttgaaattttcaactttgtcctacttttttcaagtttgttttggctattcagtattccttgaaattatgtatgaacagtaggattttttttctatttctgaaaatgccactgggattttgaaagggattgcattgactctgtagattgttttgggtggtatggctattttaacaatattaagtcttccagttcatgaacataggatgctttcccatttacttatgtcttctttaatttccttcagcagcattttatagttttcagtgaacaagtctttctccatcccctcagttaagtttattcctaagtatttctttatttttgatttatagtaaataggattgttttcttgatttccttttcagattgatcattatttgtgcataaaaatgcaactaatttttgagtgctgattttgtattctgcaactttactaaatttattagttctactgtgtgtgtgtgtgtgtgtgtgtactctttagggttttttatatataagattatgtcttcttttacaatttgtattccttttttttttcttgttgagttgctctaccagaacatccagtaccatgttgaatagtagtggcaagagtggacttatttgtcttgttccttaactaggaggaaagctttctctgttgagtatcatgtttgctgtggaatttttatatatgacttttattatgttaaggtcttcttctttcctaaagagatagggtcccactttgtcatccaggctggagtgcagtgccataataatagctcactgcagccttgaactcctgggctcaagttgtcctcttgccttagcctccttagtagctgggactacaggcatgcaccctgttgtctggctacttaaaaactttttttggagagacagtatctcactgtcttgcttagaatggtcttgaactcctggcctcaagtgttccccccaccttagcctcccaaagtgctagaattacatgcatgagactccatgactgttccagaggtagatttttttctattccttgttggttgagtgttgttgttgttgtttttttatcatgaaaggggtttgagttttgttaaatgctttctctgtattgattgagatgaccatgtagtttttgtctcttattttgttaatgaggtatagtacatgtattgatttttgtatactaaacagtccttgcattccaggtataaatccacttcgtcatggtgtatgatcctttcaatgagctgttgaattcagtttgctaatgttaggtttagtattattgctttaatattcatcaggaatgctggcctgtagggtttttcttttttcttgctgtgtctttgtctggttttggctactatgtgctcttttaaaatctttaaagttttgattttcatatttaggtttttttgtctatctagtgtttattttgtgggtatgagatagagattgatattatctttagctaaatggtgttacttattaaataatcaagaaactcacctaacacataagaactcaagtaaacttaaggtgaatggatgagaaaagatatttcatgcaaatggaaaccaaaagtgagcaggagtagctattcttatatcagacaaaacagactttaaagcaacaacaattttaaaagacaaagagggacattatataatgatgaaaaaatcagtccaacaggaaaatatcataattctaaatatatatgcacctaacactggaggtcccaaatttataaaacaattactgctagaccaaagagatgagatagacagcaacataataatagtggggacttcaatactccactgacagcactagctaggtcatcaagacagaaagtaaacaaggaaaccatggacttaaatcataccctagaacaaacggtcctaacagatatttacagtgcattctacccaataactgcagaatatacgttcttttcatcagcacatggaacattctccaagataaaccatatgataggccacaaaacaagtctcaataaattgaagaaaatctaaattatatcaagtaccctctcagaccacagtggaatgaaactggaaattaactccaaaagaaaccccccaaactatacaaatatatggaaattaaataatctgctcctcagtagtctttgggtcaacaatgaaatcaaatggaaatttaaaatttctttgaactaaatgataatagtgacacaatctatcaaaacctctggaataaagcaaaagcagtgctaagaagaaagctcatagcgttcaatgcctatatcagaaagtctgaaagagcacaaatagacaatctaatgtcacacatcaaggaagtagagaaacaagaacaaaccaaactctaacccaccagaagaaaagaaattacaaagatcagaacagaattatatgaaattgaaatttaaaaaaatacaaaagacaaatgaaacaaaaagctagttctttgaaaatataaacaaaattgataaactattagtgagattaaccaagaaaagaagagagaagaacacctaaataagctcaattagaaatgaaatgggaaatattacagctgatacgtcggaaatacaaaagatcattcaaggctactatgaacaccattacacacacacaaactagaaaatctagaggaaatggataaattcctggaaatatacaaccctcctagattaaatcaagaagaaatagaaactctggacagaccaatagcaagtagagatattgaaacagtaataaaataattgccaataaaaaaagtccaggaccagatggattcataactgaattctatcaggcattgaaagaagaactggtaccaatcttactgaaactatttcaaagacagaaaaagaggaaatcctccttaaatcattctatgaagccagtatcgtcctaatttgaaaaccagaaaaagacaataaaaatagaaaattacagaccaatatcagtgaggaacacagatgctcaatattttttgagaacaaaatcctcaacaaaactctagctaatgaaatccaacagcatatcaaaaaaagaacacaccatgatcgagtaatttcataccagggatgaagggatggtttaacatacccaagtgaataaatgtgacacagcacgtaaacagaattaaaaacaaaaatcatatgatctcaatagatgcagaaaaagcatttgacaaaatccagcatccttttatgatcaaaacctgccgcaaaattggcatagaagggacatacctcaaggtaataaatcccatctatgacaaacccacagccaacatttcactgaatggaaaaaaagttgaaagcattccttctgagaactggaacaagacaaggatgcccactttcaccactgctattccacattatactggaagtcctagccataacaatgagacaagagaaagaaataaagcacatccagatcagtaaagaagaagtcaaactctcactgtttaccaatgacatgatcatatacctagaaaacactaaagattcatccaaaaagctcacatctgataagtgaattttggtaaagtttcaagatacaaaagcaacgtacacaaatcagtagcagtgctatacaccaacaatgaccaagctgagaatcaaatcaaaatctcaacccattttacaacagctccatacacacacacacacacacacacacacacacaccactttaggaatatacctaaccaaggaggtgaaagatctctacaaggaaaactaccaaacactgcttaaagaaaacatagatgacacaaacaaatggaaacacatcccatgctgatggatgggtacaatcaatattgtgaaaatgggcatactgccaaaagcaatctacaaattcaatgcaattcccatcaaagtaccatcatcattcttcacagaactagaaaaaacaatcctaaaatgtatatggaaccaaaaaagagcccacataacagaaacaagactaagcaaaaagaacaaatctggaggcatcacattacctgacctcaaactatgccacaaggcatggtagtggtataaaacagcatggtactggtataaaaatagacatgtagcccagtggaacagaatagagaatccaaaaatgaaggcaaatgcttacaaccaattgatcttcaacaaagcaaacaaaaacatcaattggggaaagaaaaccctcttcaacaaatggtgctgggataattggcaagccacatgttggagaatgaagcaagatatttatctctcaccctatacaaaaatcaactcaagatggatcaaagacttaaatctaagacctaaaaccaaaaacattctagaagacaacattggaaaaactcttctagacactggcttaggcaaagaattcctgaccaagaacccaaaagcaaatgcaaaaaataataataaataaataaataaatagatgggacctaattaaacgaaaaggattttctgcacagtaaaggaaacaatcagcagagtaaacagacaatccacagagcaggagaaaattttcacaaactatgcatccaacaaaggactaatacccagactctacaaagaacacaaacaaataagcaagaaaaaaacataaacataatcctatcaaaaaatgggcaaaagacgtaaatagacagttctcaaaaggagatatacaaatggccaataaacatatgaaaaagtgctcaacatcactaattatcaggcaaatgcaaatcgaaaccacaatgagataccaacttactcctgcaagaatggccataatttaaaaataaaaaataaactctcaggatacaaaatcaatgtgcaaaatcacaagcattcctatacaccaataatagacaaacagccaaatcatgagtgaactcctattcacaattgctacaaaaataataaaatacctaggaatacaacttacaagggatgtgaaggaccacttcaagaactacaaaccactgctcaaggaaacaagagaggacacaaacaaatggaaaaacattccatgttcatggataggaagaatcaatattgtgaaaatggccatactgcccaaaggaatttataaattcaatgctatccctatcaagctaccaccgactttcttcacagaattagaaaaaactattttaaatttcatatggaaccaaaaaacagcccacatagccaagacaatcctaagcaaaaagaacaaataagaacaaatctggaggcatcacgctacctgacttcaaactatgctacaaggccacagtaaccaaaacagcatggtactggtaccaaaacagatatatagaccaatggaacagaacagagccctcagaaataatgccacacatctacaaccatctgatctttcacaaacctgacaaaaacaagcaacagggaaagaattccccatttaataagtggtgttgggaaaactggctagccatatgcagaaatctgaaactggaccccttccttacactttatgcaaaaattaactcaagatggattaaagacttaaacataagactcaaaaccataaaaatcctagaagaaaacctagccaataccattcaggacataggcatgggcaaaggcttcatgactaaaacaccaaaagcaatggcaacaaaagccaaaattgacaaatgagatctaattaaactaaagagcttctgcacagcaaaagaaactattatcagagtgaacaggcagcctacagaatgggagaaaatttttgcaatctatccatcttacaaagggctaatatccagaatctacaaggaacttaaacaaatgtacgagaaaaaaacaaccccatcaaaaagtacatgaaggatatgaacagacacatctcagaagaagacatttatgcagccagcaaacatatgaaaaaaagctcatcattactggtcattagagacatgcaaatcaaaaccacaatgagataccatctcacgccagttagaatggcgatcactcaaaagtcaggaaacaacagatgctggagaggatgtggagaaataggaatgctttacactgttggtgggagtgtaaattagttcaaccattgtggaagacagtgtggcaatttctgaaggatctagaaccagaaataccatttgacccagcaaccccattcctgggtagatactctaaggattataaatcattctactataaagacatgcacacatatgtttattgcagtactattcacaatagcaaagacttggaaccaacccaaatgcccatcaatgatagacttgataaagaaaacgtggcacatatacaccatagaatattatgtagccataaaaaaggatgagttcatgtcctttgcagggacatggaagaagctggaaaccatcattctcagcaaactaacacaggaacagaaaaccaaacaccacacgttctcattcatagtaggagttgaacaataagaacacatggacatgtgtgagtggaacatcacacaccatggtctgtcagggggtgaggggctggggagggatagcattaggagaaatacctaatgtaggtgatgggttgatgggtgcagcaaaccaccatggcatgtgtatcactgtgtaacaaacctgcacgttctgcacatgtatcccagaacttaaagtataattaaaaaaacaaaaacaaacaaacaacaacaaaaaaacagatgttggcatgcatgtggtgaaaaagggaacacttacactgctggtgggagtgtaaactagtacaaccactatggaaaacagtatggagattctttaaaggactaaaagtagaactacaatttgatccagcaatcccactactgggtatctaccccgaggaaaagaagtcattatatgaagaagacccttgcccaggcatgtttcacaactgcaaaattcataactgcaattcacaactgcaaaaatatggaaccaacctaaatgccaatcaattaacaagtggataaggaaaatgtggtacgtatatacccatacatacataccatggaatactactcagttgtaaaaagtaatgaaataatggaattcacagcaacctggatggagttggagaccattattctaagtgaagtcacgaagattgtcaggccacaataagggggtcagttaatgtgaaatctcctgatatttttgtagtagtatcagcctgaatgtataattctgcatctctatttgtacctttagcctagtgctctagactagtattatccagtacaaatataatgtgagccacaaaggtgaaccacatatgtaattttaaattttctaatagccacattaaaaaagtaaaagaagaaacagataagattaattttatttatttatttgttttagagatagggccttgctcttttgcccaagctggagtgcagtggtgtgatcatagttcactgcagcctcaaactcctgggctcaagtgatcctcctgtctcagcctcccaactcactgagattacaggcaggagccaccatgccccactgaaattaattctaatatatttcatttaatctaatatatccaaattatatcaacatataattaatataaaaattattattttatctttttcatactaaatctttgaaatcaagtgtgtattttacacttacagagcatctcaattcagaggagtcacatttcacattcttagtagctgcctacagatagtggctatggttttgaaaatgtatctctaggcaatactttcttgttttttaagaaactaggtcttgctctgtcattcaggctgaagtgcagtagtgcaatcatagcttacaggcaggggcaaccacgtgcagcctgacaatattttttcccccatctaacagcaatgcggttcagagaacattttcttagtttcgtggtaaggagattaggtcaaaccagaattggaagtcaggctgtatcatgtctgaggatactcatttcacatatcagtgaaatgagtatggcctcatttcactgaggccatactgctatataattaaacatgactgatacgatgagacataataaatatttcaggttgccaggtgaactgaaagaattataggaactgaaagatagaatgttagtcaaatacaacaaaatgtgagtcacacacatagaagttcagtgaaagatcttgtaaatggaggcaggttaagccccttgctcctttgaaagtcttgttttgatttctttgcttcttttaaaaattcttcataattcccctggaaactaaaggatgtgaacattaatgaaactgatacatataatttcatttcctacaaaatacatatttttagatgttagcactttgaaagggaacatcaggatgctaaaccatgacctataaataacaggctatattttaaaatataaaacaaactgatcacagcttttgagaggtttcatcttcctgaatctccaattatcttctggttctgtttctaagagagtcttcaaaaggaaaaaataatagcctcaggcaagcatgtatctatggagataaacaggctcatatacatatcagtcaaggtacatacttgttttgggtatttattcctgtatgttgaactctgaaacttaatggcttaaaaaataccaccattctagttatctgctcgtgattctgaaatttgagcagagcttagtggagtgaactcatctctgccctacatcgattgcatcgactggcatggctcaatgggggctggaagatcaaatcccaagaagttctcactcacatggcaggcagttgttgctgtttgttgacgaggaacacagctgtgtctgttgaccagcagagctaagaatgataggaactgaaagatagaatgttagtctatcttaatgttaggctctctaaggacagccttagttgtctgtatggccttttcacatgactgggttggacttttcacaggatgttcagatttcttgaataacagctggcttccctcagagcctgagcaccgaagtagagctgctggcctttgttaagggttagtcctagactttcagagtatcacagtctcagcattttattgcttaaagcaggtcacagggccaggccacgtgcaaagggaaaaacttcacaagagcatgaatactgggaagtgtggttcactgagatataatagcatccacattagtaaactcattaatacagcccacttctcctctcaatagatattctcacctttaaacctctgttaccctattagaatcaataattctctatactgatgacaaccatgttagtatttcagcctgtggttcctggccaatacccaaattcttataaaaagagtttcttggatacctttgtctgaatatcttgctgataccactcactcaacatttgcaaactgagctcctgaattcttttttcttttttttgaaaagggtctcattctgtcacccaagctggagggcaatggcatgatcatggctcactgcagcctcaaactcctgggctcaagcaatcatctcatctcagcttccctaggagctgggactacaggctcacataaccatgcccagttaattttttttattctttgtagagatgggatcttgctatgttgcttaggctggtctcgaactcctggccttaagtgatcctcctgcctcagcctcccaaagtgttgggattacatattaattgccttctctctgtagtatagaagaaacatacgtcatctgtttccttctactctgagcttccttggagttggtgtggtgcagcctgggctttcaaaacagacttaggctggaattccaaccgcgtcattttctagctgtgcatcctggaaaagttacttaatgtccctgtggttcaattttttaaaaattgacaacttaagaatattaacacaattaccttcctgggttgtagtaaaaattaaataagatacataaagtgtccaattcaacatttggcacattgtacagaaacctattcatttttgttttccagtgcagtagacttagggttgagtgaatgtatcattacccttctttggaaaatcctgggagtgcaagattcagttgttttccataaccgttaggcagacccaaagtgtcttgcccctagatatgcatctttgagtatgtttttcaggcagatcctcccttctttctgcttacgtgataagcatgctacaagcgactggcattccctggctcctgctgcatcttttctgagttgccatgcttcctaactatgtgcaggagacacaggcacacggccaatgcccattaagtcattattaaggctgagtctctatctagctccgtggctagctctccagcattgcttcatatttcctcaccaagccagcaaagcctgcaccccaaaacctcaatcctagttgctgactctctgacctcaccccatgtgggcaccccctctctccttctgctgctggaggaacttccaaatatgataccatgtgggcaccccctgtttccttctgctgctggagaaacttccaaatgtgataccaaccaagtctgcaggaccattccagcctcttcctggagatcagcattccagattcgaaaaggcccaaactccacagcaaagtctgtgggaacttgctttttcctctttttctgctgccctacatttttctatcttttagaattcacaggggttcaaaaacatacattagattaacaatactgatagtttaaacacagcatagtggttgagaagataggctttaaatttggataaagctagacttgaatttaataccacaatttaccacttgtgtaatgttggctacttacttaaatctatttttctatctaaagatgagaatgatagtattctataacacagagtttgcatcatttggttccaagtaaagcaatatgacttcagtggcttaaacagaaagaagtatagtttctctcacttaacgagagctctgcaaatggtggctaactgtgttgaattagtacctcaatgctatctcccagttcttttgacctttgcctcattcttattgcctcatgtttgcagaatggctgatgtagctccagatatcacatttatattcaaagaaaccatatctttccttttatcaagaagatagaaggattctctgtggtctctgtactagacttcctgttagccagaaacagggcatatgacaattctttagaaaagagctgggagattggggaattgttatcattattggtttagaccaaccagaattcatatcctgggttgggaacattgcagctcagaaaaaaaaaatcaggcttttgttaccaagtaagaggtaggttatggctaaattgtgggtaaccaataggggtttggtttgacacagggttgtagtattaaatttaataatatttgtaaagttcttagtatagtgctggacttttacatagtgtttaataaactgtggccattattataaataaaattgccaaattggttggccatgctctagatctagttatttttaaatacagtatttataaaattataaaattcatgaaactcagctctactgatttcttggagagtgcactgcatcctcgttagctcagattttgctttctttttttctttcgtggcacaaatattcattcagtaccaactttgtgccaggtgtaagcacaggtacaagtctagccttctccctgacactatgggatccccaggcctcaaaatttaatttctatgccatttatgcccatgtttctcatgctggagcctcaggcccaagcctctgcagatccatggtgcttcctctttttccacaaaatcagaaaccaaaaggatggttcttaacttggttaagcatagcacgataaactattgtcaagctcacaacttcactttgaggttttgcgatcacctaaatgtaaattcaaatgaagcagacatcagcaaaggtactagggaactctttacaaagctcacacttctcagggataccaattcaaaagctctccagattctgccatctcatcattactctcattagacatttgctgattacgggctatgagtcagctgaccttcctgtgttgaacccaagaacactttacatttgtagggctatttcaaagccagtcctcatttttagaagcactgaggtcctcaaggcaggttgcattatcctgaatttattaataaaggtactaggacccataaaggggtctgttcacagtgccaggaaatttgtacacattctctcatttaatcctcacacactgacagttaggtaatactattgctaatttacagatgagaagtctgaggcccagagagagtaaattacctgaggtcacacagatagtcaatggcaaagccacagctggaactaaagccttcaattttcaatcccccatacttccccctgtgccatacagtgcctcactacatgcattctttggaatacatatctatgatgaacccttttatgtggtctgagtaaaagttttatagagaaaaatgtaattcaagctatagttgtttgtggatttaaattgcctatattttctatcattgcacttatagaaattacagaattccatatctactatacctatgctacaattctattttcttttttttctttcttcctgacaactcacaccctctccactgccaccagcatcattttttgcttctttttgctacaggagaggaagttattaaagggtaacattaaaacaagcttaacaaccttattgcaaggaatcactaaagcaatattagcgttagtcctaagggctgattaccttatctcaactttctccccaaggagagacaaataccaaggagatatcaggaagaatattgtccccagtaaataccaagtcacatcaggaagaatattgtggagagagaggtaaagaatcaggatggaaacagaaaataggccgaacaatggccaagcgtcaaaatcctacgtcaggtaattattagggggaagtgaaacaaaacacatcctgaaatggagatgagacaggctcctgcttcccttcaccttgtctttgatatagagattgaaaaacaagagtgtgacctctctcggagctccggaggccctctgcttgggatgtcctagaggatcctctgcccagtgtagggtagagggagggatgataaataattgaccatttactaaagttccaggcacttaataagagttaatttacagaatccttaaataattcttcaaggctagtataattgaccaaatattacagatgaagaaactgaggctcatagaggtctaatagtttgctcaatactataagtggtggaagtgatattcaaacccagattcagcctaagacagctctccaaatagctgtaatttattgcctcatttgtgcaattgatctttggatctaaggataggactttacattgatccctcttatgctgtgggagtcagtgtgtcaaagtaactttgactgggcttgtcagtcacgtaggtaactctacatactagattttcatcattgaaaaattttgtataaataaaaataaatgccattaaattaacacaacagtgaagcactcaacagttgacatagcactttgatatatagttattgacaactcctcttttttcacaccttgtgctaagttatcacttcgtctttggcagctgaaagaaataagatacttaagtatagccataggttgttacaattgctacaatttgaattcactctgttctatgctcaactgcattgttactgtctacctcgatctgaccaaattgcaagcattgcccctttccacttccagtgcattaggaaaacttaaaggaagcccctgtatcaggtcactctgatagattctgaaattatatcctgtacactgtctcatcccactagaaaattgtgcatcatgtcactgccatgttagaaaaatggggcttacctgagtcaatacacaagagaaatatccagcagatatgctaacactctacagcctcacatggaaattctctcccttttgaaaccttagtccaagggttcttgccagaaaattcaggcctgctacccatgaatatcctagtcttcctgtgactatgagtgtcctccagtctttctgaaaagcagagccacaaggccctgtgagaaaacattttaaatggtcaattttcaaggcatgataaatctaagtactggcagccagcctgcagatgtaacaaacagcatgcatgcatctagaaggtcacgatatgtaaacagaatgtagaggaggggtcagcccataaaagggaagaaagtttcgttattgggaaatcaaagcttaagcaggaaggggaccagggtataaccttataagggggatgattaaacttaggcgacgtccaggaagattgtaaccccatagtacttgaccaatgaggaactgggggagggatttgcatgctaggaggtaaattacctgctgtaactgcccagggtgtacctgtctaccagacacccgatcttgcaagacccccatcaaaagtctcacttcggctactcttcatgtctcggagtccattctttgggtttggatgggtgaatatgtgtttctcacagcactgtctttgtttcttcccaggacagtgctaggactgcttttttctatatcagacacgtgggctcctgctgtgtcttcctggaaagcagaggccaaggatggagcagaccaagaggatgccaggaaaaatcacaaagaagcccagaaagcacagctggaagccaagaaccctatttttggtttgtgtgggtggaaggtgagggacaacatatagtgaccaacaggattcttcatttgaaagagaatggagtacatcagacctgtgtatttaggtgaagtatgataaacatcatcatacttcaaagattatgaacatcaaagattatggaaaggaacatgactgcttagtttattccattaccagtgatctgcttgtttgttcatttgcttacccatccattcatttattcattcattcctccatccattctctttcacttattctacaatcatgattgtatgcctaccatatcgctagagagagggcaggaaaagatccaaggatgtgaatacaatcttctgcttcatgatgagagctaaaggaatctgtaaagactttgtctttttcatttttctctctcctacatagaccctggaaaatgttttatttcttataatttgcctgaggtttactcatccactaccagagctctgaaaacactcttcagaacactattttaaaataatgacaatgacaataatagataacatatattcagtgttttttgtatgtgaagcaatgtaataaccatttaaaatgattgtaactatactttataagagtatgatgaaacaggcactattaaaatgctagtttttcacacagctaatatgagagagagctgggatttggagcctccattcatggccattatatggtctgtctaatgaatgaaatgtttgaccttagagaaaacttgaaatgcatagttttctttgctgacttgaatgatataagtttaaaaatccgatagtggttgctagttgaaaattcctattccttgggaaactgttgaaagtctgtttagtactaacccccctcattaatggccatttgcaaagccaggccaagtttagtcttctaccagcactgaagaaacacatttttacccagaagaaatgagggtgaaatcctctgataactggaagatgctggatgttctggaaagaaaagtaatttttttttcaatctctggaaattgctttttttgttttaagtaagggtggctcagtagatgctaacagagaagctgggatcagctaatctggagaagattctgagagaatgagttggggaagctcacactgagaaaatgagaagattggtaggaagggcggtttcttgctgtgtccaagaacaggaattgagaaatggtattaagctgaaggtgagaggggaacaaagaagactttgaaagttgcatacaggtttgaaacaaagtataccacaaggaatgggaacatgtagagctgttttaaaaatgtttctgtgtttgtgtgagtgtgtgtactagatatatttttaaaatgacttttctcggaattacatcatactttgaagatcagcataggaagtgaagaaggaacaaatattcactgagagcattcactaagggccaggagctccctgaataccacatatgccaccgctctctcttgtgatcctgaaggtctgtgaggcagttatcactatgtatggtatattttcaaagaaagcaaataaaacccaatgtgactaagaaagatgctaaagtcatacagctaattagctgtgggtccaggattcaaaccagtgcacccagcacatggtcttcaataaatatttattgagcagtgaatacatgaatgagtaaataagatgaagcaagcaagcaagcaggtaggcttgtctaacccaagtgttcatgttctatcctctgtactggtggtttttaaattgtgtgccacaaaggccttgggtaacatgaggagggttagtatgagtggctgtctagcagcatggggccccaggctccctatctctactccaaccagggcatctctgcttctgtttgtgttaaacattgggcttttgcctgaggtttcatttgaagaagagggccttcttctagaaagtgtttattactcctgccccatgccgtgttccctcctaagtatgcattatgaactagttaagtttaataaagacatatattactgtaaagttggaatttataccagtgtctgaattccagtagcagcccccatatcttggtaatcgaaagccaactgtttctaatatccggcatgctgctgaggccattaacaatagatgagccatctagggcattatggctagcagccgggactacaacttcaagctgtctaggttcaactgtggctctgccatgacctggtgaaatctcaggtaaatgattcgacctctccacactttagcttcctcatccatgaaatgtgatagctaccttatacagcatggaaactttgtgctccagtaatatgaatgggctcactatagccaagtgcacttagttcccttgatctcacgtttttgtttatgctggctcccaacttaatgtggtcttctcacttttcatctgactgtgaaaactccaaccaaaggtacttatattcctcccactcaataaatatgatggccttggtgtcagtaaggcgacatgtgaagagagatatcagtctggcttgccatacattacaagaatttgcaggcttaccctgacagtcctagtccatgggagtgggtgatggggtactattgtgtcactgtccggggtcctgaataattaaagagtgcacagtggcttttacaagaatactaagaattatttatttgttaaggtaacactatctgctgtagtaggtaaccctctctacccccaaatctgagtagcttaccatattagaagtcttttcctgttctcatagggttccattggtgctgggggtgaggaggggaggtggtaaaggggtttgttccacacaaccattcagagattcatattgatgaagacggccatcttcaacatatagtttccagagttgttctgggctcagtatttagactccaggtggtatatcagaggagagaaggagagtagagaactgtgtggcagatttttatgaaccagatctagaagggacattcatcactgtcactgggatgctgttaattaaaactcgagcatacaaccattcctaagaataaaagaggcagtgggatgttgcttatttgtgagttcattggaaaatcactagcttgtttttgccacaaaatattttttatgttgttacccaatacccccccccactgagacacacacacacactcaacacaaatacaactagagcaaaaaattcattaaataatcctctgtgtgtgatatagtctcatagtttctattctattttattgttttaaagtgctgtcatgacccattaa

SEQ ID NO: 107 - DNA, 12700 bp, Homo sapiens
actgctcccgctccattgtctgggaattgcagccgcggggcgggcggcggcggcggcggcggcggccgggacccagcgggccaggtggggacggcgcggagcgggtgcgggagatgccgtgcgggactggggccacctgagccgcccgcctcgtccccgccttctgtgggaaggatgtgcgcgcggatggccggtcgcacaacagcggcccctcgggggccctacggcccctggctctgcctcctggtggccctcgccctggacgtcgtgagaggtcagcgggaggggagggccggggcgaggggcggccgggcccggccgagtgggagcgagtgatgcccgggagccaccaacctttgggttctcggactgaaccctgagcggggtcgccccgcagcgccctgaaggtcggagagttcttgccctcgggaacctgcccccagccactcgcccctaaggcttccttcaccttgcacgacccggcaactccttcctgacccggggcagcccggcgcaggggcttccccgtcccgcaccttctgcgagggacccctcagcccgggcatcgaacccggcggccccggtcccgggcgcactagcgtcatccccactccctcactgtggtctgtagcgctgcaccctcctagcctccttccgccgccaccaacccacccccctcgggagtggaaagcagcccctttgcctgggacctgcaacagacgcaagccctccctcccccttcccccagggctccctgaccttggcgtctccagggatggccgcatccttgccttccagaacctttgagaggattcctgtcactgcgggaaagggcagcaacttccctgtgcttcggggtgggggtcggactcccttggcctgggctagctgggctgtggctgcaaggcaaaggatgccacagaagacagagggacagtgaaacattctctgccctccccaccgagagagccgagcgctgggtgatgggagtccgtgggagtcaggctaagagcatcttgtaattatggaggcaatggagtaggaggcgaacctgaagccagtggctgcccccagagagcagtggtcacttgttacgcttggggcagggggcagggagagcctgtcagtcatatgctccttggtggggagggccaggaaggaggttgaaaccaattcccccacccccacccacagtccagctgtggggctgagagggagctagctgtggggttgctttcagccacctgctccccatcccgagggacgccatgggagtcctaatagagagaggaggaaaaccttgtcaaatccattatgcagcagcaataatgcctgctccctccagacagcactccacagtttacacagccctgtcctgtccacagtgccacctaatgctcctgccccttttacaagtgaggaaacaggcttcaaaatgttaatgcctgacccaagtttcatcaatttaaattcaggtctccaggctcccaggaaatcctctctagggagcgcttcctagtttgggggaattccaggatgagcaagacagggtcccttgtttataggaagattactaattcagaggaggcacccagggttgcaaaagacaggagactggtgggaaggtgagtaaccaaggagggcttccttcagaaggaggcagtattcactcatggccctgaatgaggagggaggtgccaccgggcagagcagaggagaggaggtgcgctccagggcatgaagcctgcagggtgcaccgtggcagtggagagtggagagagaagtggcaggtggagacgccggatggtctagtggctaatacctgggatcaacccccagctccttcactctccagctgtggaaccacaggcaaataccttaacctctcggcctcattttctacatccacaaaatgggattcatcataatagaacctggttcacagaattattacaaagactcaaagagttcatatacatacagtatttaaattctcacctgcatatagcattcacaaaatgctaattattattattagtgctcatagttagagcaaaccaatatggcttagtgctcctttgtccttctgatgattgactattttgactgtcttccccaggctcctggtccccaccccacccccagggcaagcaagtgccttcacagacctcttcagcaccttccgcgcccgcccatcccacacttgcactcgataccagtcggttcagggaagaagggagcaagcttggaaagatggtgcaggttgccatggcaatgatgggggaggaggggtggatgcccagcagagcctggccaaggattcagggcagagaaagctcacttcattaccatattttactacactggcccagtctgccgacggttgcaccccagaagtgccttggtatcagaggcgagtagatggagggcaggagttggggaaaaggagacattgagaaggctgttggcgagaagaaggccaaggtctgtggaaagtagaaggaatagctgggaagcatccagtcctggactcagattcgaatcctggctttgctacatactacctgtgtgaggctctttaagcctcagtgacctcatctgtgaaatggtggtgagaggggaagggacatttacagcccttttctccctcccttgcccacaactactgtgccccagcatggcacccgggtcagcccctgccagctctggagctgtcatcatctctccctcttatgcctcttcagtggactgtggccaggctcccctggaccctgtctacctgccggcagccctggagctcctagacgcccctgaacacttccgtgtgcagcaggtgggccactacccacctgccaactcctctctgagctcccgatctgagacctttctgctcctacagccctggcccagggcccagccacttctccgggcctcctacccaccttttgccactcagcaggtaaggagggggcaccggggactctcaggctaacaggactcagggcctgaggtctgctgggtacaaattgggagccttccccagccccggctgtgctccccatattccagagggggaaactgaggcccataaaggttctcttctgccaagctgggatcccatcttcctagatcttcccctcccaagctcctcttttgttaagccctctcattctccctccaggtggtcccccctcgagtcactgagccccaccaacggccagtcccatgggacgtgcgggccgtttcagtggaagcggctgtgactccagcagagccctacgcccgggttctcttccacctcaaagggcaggattggccaccagggtctggcagcctgccctgtgcccggctccatgccacacaccctgccggcactgctcaccaagcctgccgcttccaggtgagtagacaggccccacctaggctggtcctgctgcagctgcatcagccaggtggtgggcccgcggcagagaggaaacccccactcctgggaagcgcgggggttgtggaccacccgactccatttctgcccccactagctttcagtgctgtgaaaaggttatttagggccccagagggagttcagtccttggtgtgtgactttgagtaagtaacttaatctctctgagattcagtttcctcatctgaagaatggggtgttaagaattcctaccccatctggagttggagtaaggaacaagtgagatgaatgtaaggatagcttacggcagagtaatcaatcagccagtgtgtttgcattattagtagtgttacttttataattgctatttccactattttggagtctagcacaggaatccatgggagaggcgtctcttgagctttaggattctgagaagaagactggattctaggcaggatagtcctgggcttggttagggtaaggccctgggattggcttactttgtaatgagacctatcccaagggctgaagagtggtctgcggacatgctctgaaacctagacctggtttgaagccccagccaggttgctggtttgctgtgtcactcaggctgtgtctccggcccatgctgggcctccctttcatgagcccctccagctctgggtttcctgccatgggtgctgagaatcctgttcctcgccctgcacccacccccatgccaattactgctgtcgtgtcttcacagccatccctgggcgcctgcgtggtggagctggagcttccctcgcactggttctcacaggcctccaccacacgggccgagctggcctacacgcttgagcctgcagctgagggccctgggggctgtggctccggcgaggagaacgaccctggggagcaggccctcccagtggggggtgtggagctgcgcccagcagaccccccgcagtaccaggaggtacctctggacgaggctgtgactctgcgggtgcctgacatgccagtgcggcccggccagctctttagtgctaccctcctgcttcggcacaacttcacagccagcctcctgaccctgcggtgagcaccaggccacggggatgggtgagggtgggaacctctgtgggaagactagggacaggtacctgctcctcctggggtccttgctggaatccttgacctctgcaaaacatgtgtccaccaaactaaactccttccaggtaaaaagccatgactgtgctggtaggagcccaccatgggcacagccctggaattagagtcagaagtaggaagctgccccttcccctggcacctccctgagattcctttgtccaatggggctaacggtccaccttcagggcagctgcaagtctccagggaggggaacccgcaaagggcttagagactgcagtacctaagtgtgagctcttgctccagtgctccagagagggatatttgccccaatcacgttcacctacatgctgtccctccttgccaccctcgccgtaggagtctagcctttggacagagcttgctcttccccataggaaggccctgattctttgtgtccttttccgtaataagttcccccaaagcagcccccacccacctacccagttcacccggcaagggcttgcagagtatgacttgcttctggagtccagcgcaggaatccatgggagaggcatctcttaggctttaagattctgagaagcctgagttctaggcaggatagtcctgggcttggttagggtgaggcactgggacttgctcactttgtaatgatatctttcctgaggatcgaagagcggtctgtggacatgctttgaaacctagacctagtttcaagccctgcctgggtttgtgcatgtcccgtctctgtgtctccccatctcctacgccctcctatgctcactcttattaagcagatctttcctagacacttacagcctgccaagccctgtgtcttcactctgcagatccaaacacgagcaagggccagtccctatctggcagaaaggggccccagtggtagggaagggagctggatgggcatgaattggattagaaggcatgtgggtgtgtaagcactgagggaggttcaaagtgcggtgggagctcaggtgagtgggtgcagtaagggggaaattcatcccaccactggaaaagctttctaaaggaaatggtctgtgagttgttggaggcttaaagcatcagcaggtaaagtaagaaagggcagagcaggctgaaggcacagactgggcaaaggcttggagtcacgaatgggtgccgtgtgtgtgggaaacttgtgtgtagctgaagcagagagtgcatggagagatgtcacaaccgaagttaaggctggaccagaccctggagggcccccaaatgcccggctaagctttgaccttatgggcagtggggaggcgtaagtggtctttgggtgggggagagctgtaaggtgtgagctgcactgaggcggggtccttctgggttggaggatggtgaagaggagattcagactggagccagggaggtcagatggctttggctccttgtctttccccttcaatccagcccacagttcagcatgcaccttgccaaactgagcctatactctcttccccaggatcaaggtgaagaaggggctgcatgtgacagccgcccgcccagcccagcccacactctggactgccaagctggaccgcttcaagggctccaggcaccacaccaccctcatcacctgccaccgtgctgggctcacagagccagattccaggtgggcagtttccctccacccagggggcaaaggagggagggctggttatagagtgcagttgagcagatttggaggctgccatgctgcctctagatccccaggtgagcagacccaaggacagattttttcaaggaagcagcacaaagcaggcataatccattccttcattcattcattcggccactatcttcccagccccagccatgtgccaggcatagcaagtgtctgtgagtcttattctaagagatgccaaccaatcctgtgccccaggtagagccctcatagccactactccatccccctgcttccaccaaatgatcctttctctgggccgttcacattcccccaaaaagcccagctgcagttctgcggttgtgaactcttcttattcatgccctgagcctgggtcaaggccatggactcagtagccccagttcgaattctggttctgatgcttttgggatgggcaaaaccttgggcaagccagttaacattcccctacccaagcctcagtttcttcacttgtgaaataggaataataatgcatcccttagcatttttgaaaataaaatacagtgctacatatcaggcacccaggacggttcccagcacataggtttttgtttgatcaaaggaagcttatcattcagagggtcaagtgtctggtcctgggacctggaagtgaatctcccgcatgccacctcagtggctgtggaaagcggaagtctgggggaagcgggcccgggcaggcaggggagtgagccaccttgccaggtgggaggtggttaaatggcttcatggatcttagagaggccaagagtgggtcagagtttggggtctagagcgaggatgcttgggtttagatcccagccccgctactttttgctgtgtggtcttaagtgagctatgtaacctctgtgcctcagtttcctcctgtgtaaaatggggataatcatgaatgcaggaagtgctgaggccatgcctggcagctagcaagcatttggcttctctgtctcctttggccagcagtccccttgaactgtctgagttcctatgggtggactttgtggtggagaatagcactggtgggggcgtagcggtcactcgccccgtcacgtggcagctggagtacccaggccaggcccctgaagcagagaaggacaaaatggtgtgggaaatcctggtgtctgagcgggacatcagagcccttatcccactggccaaggtaaggagacctccatctctgcctgggaaggctggaggccaagtcccaggagccccatgagctgaggggcctggggctgagcccctcctccacccccaggctgaggagctggtgaatacagcaccactgactggagtgccccagcatgtccccgtgcgccttgtcactgtggacggcgggggggccttggtggaggtgacagagcatgtcggctgcgagtctgccaacacacaggtcctgcaggtgagtggcaggtgcccagctcatgtgagtctgcatttgtgtgggcacagttacgcacacacacctttcctccttcctcatgtgggtccccaagagaacagcttcttcttgagacgagaaacctcatgggaggaaccacagcttcaacttcttttgttccagccacctctctcccgagtcaagtaaccctaacagccccccgaccttagacactttcacgctcattattgcactggcaagtgcgctggcctgagagagtcgagagcacatactctgggatcagaaagttttagtttgaaacacatctttgttgtcaaccagctttgtgatcatgggctggtctcttaacctctctgagcctcgttacctaaactttaaaatgagaacatatcttcgggttgttgtaagaattaaaagcactttaagacagtatttagcagatagcaggggctgaaacaatggcagttattgctgttataatatgatgtaataattatacaatggtaaaaattattattattattattaccggtgattgtgaagtgaaataaaagggagggtggtagagcaacttcctctatcttgaagttctaagaggggaagcatggagtctgcatgtatgcaaatcccagccacctgaagggggaaggtgcctttccccacttgtggtcctttgctcaaatgtgtgtggttcctgctggagggccttggtgggagatctgctttgtcccacctctgcctacctggctgtagctggttgccaggtggctccaagagcaatgtcaaaggccagcatgaataaggagccaaagttttgggttcacacccctgctctgccaggaggaagactggtatgcaatggccagttcccctgactgagccccagggaacctcaaggaatggcccctacagtaaaatcttaaacaaagaacaggggcttaaccaacaatcctgctgcaacatgcattccagtgacacacagagctgaactcagtgggagcccgtcctacggcctgaggtcagggctgctctcttctggcccatgccttttttttttttttaatctatttattttgaaacagagtctcactctgtccccaggctggagtgcaatggtacagtccggctcactgcagtctcagctacccaggctcaagggatcctcccacctcagcctccccagtagctaggactacaggcatgtgccaccacacccggctgatttattgtattttttgtagagagggagttttgccatgttgcccaggctggtctcaaactcctggactcaagcgatccacccacctcggcctctcagagtgctgggactacaggcatgagccacccacccggcccagcctcacacctgtctttagtggcttagcccgcccacctgccctctgcccttccataggtgtctgaggcctgtgatgccgtgttcgtggctggcaaggagagccggggcgcccggggggtgcgagtggacttctggtggcgccggctccgcgcctcgctgcggctgaccgtgtgggcccccctgctaccgctgcgtatcgagctcaccgacaccaccctcgagcaggtccgcggctggagggtacctggccctgctgaagggtgagtggaggcctgaggaagctggcaggccttggcgagtcacactgggacggagagggcgcaggggacacagccatgggcccaagtcggggtcagaaaaactgccctgttgcttgcagttccttctgcccacctccaccctgggccgcccagccaatgatcgctttctgtgaaattgctgacttccgcatccctctcctccttccctgcctcacttctcccgtagcaccctccacttcctaatctacgtcagtactggttaatgttgcctgtccatcctttccacgctcctcccccgagaatgtcagccccttgaagctgcggtctgtctatgctggtcgtaccctcagagcctaagatgacacagagctcaggaaatgaacaccctcggagggggctccccaaaacccagggagaggtggcccacgcctctggaatctagcttccaggcccttcagagagtgagcgcccccagggtccccgtaagagagcgtctcccctgcggtccacttgggagcaagagcggtgatcgaggcacagcgccagtcgggagtgggctggggcggctcgcctgcaggtggaagggcctgaccccaagaggggcggatgtctgcgtttgagaaacaggagctgctggtgattaggagccgccggggacgagctgcgggtctccagcagctgggccctgggcaggctggggccgctcagcgctgacggccagtcccggcctccccgccctgcaggcctgcggaacccgctgcagaggcgtcggatgaggccgagcggcgcgcccgtggctgccacctgcagtaccagcgggccggtgtgcgcttcctcgcccccttcgcggcccacccgctggacggcggccgccgcctcacgcacctgcttggccccgactggctgctagacgtgtcccacctcgtggcgccacacgcccgcgtgctggactcgcgtgtagcctctctggagggtggccgtgtcgtggtgggccgggagcccggtgtcacctccattgaggtaagcagctggggaccaggagagtagaccccctgagaagggtggaggggcccccaaaatgttcgtgggtgggagtgaagagtgtgccaggagcccagagtgtgtgggggagttgtgcggtctaggtctgagtgcagtgggattggggataggctcagaatggggtggccgcataaggggggaagccctctagctatgaagggctgaggtgtgggtagtgtggggaccgggtcttgagggaaaagggaactgccccctaggtgtgggattggggtccaggtatgcaccggggtgcaaagagtagagggatagtagcccatgagcctgctgggagtacccggttccctctgggtgggggctgtccgtggcgaagacctcccccacctccggagggcagcccgtgagggtgctgggagcacccggttccctctgggtgggggctgtctgtatggaaggccccccacctccagctcctttccaccctcaggtgcgttccccactgtctgactccatcctgggggagcaggcgctggctgtgacggacgacaaggtctcagtgctggagctgagggtgcagccagtgatgggcatctcgctgaccttgagccggggcactgcccaccccggggaggtcacagctacgtgctgggcacagtcagcccttcccgccccaaagcaggtgacagttggggggtcagggggatgaggtcaacatctccagatgggggctcatggtagaggggaatgggaggaagggaccctggtacctcgaccccttagggttttcagagtgaggactgactctgtgaggtagtgagctctctgcagctggaggtgatcaagcagtggctggagtatggcagtgggaggttggttagatggctctaactgaggaccctcccaataactcagaccctagggctgagtggcagacaggtgattgacacgcgtcccctctctccctgtgttttgtctatctgcctgtgtctctgttttctctctggtctctcctccatgtggcctatctctgtgggagtggtttctctgtgcatgcgtgcgtgccctcgcatgtctctgcctgtgtctgtgtgccccacaggaggtggccctctccctatggctgtccttctctgatcacactgtggccccagctgagctctacgaccgccgtgacctgggactgtccgtctcagccgaggagcctggtgccatcctgccagctgaggagcagggtgcccagctcggggtggtggtgagtggggcaggcgccgaggggctgccgctgcatgtggctctgcacccgcccgagccctgccgccggggccgccaccgtgtgcctctggcctctggcaccgcctggctggggctgccccctgcctccactccagcccctgctctcccatccagccctgcttggagcccaccagccacagaagccaccatgggtggtaaacggcaggtggcaggcagtgtcgggggcaacacaggtgtgaggggcaagtttgagcgggcagaggaggaggccaggaaggaggagaccgaagccagggaggaggaggaggaagaggaggaggagatggtccctgcccctcagcatgtcactgagctagagctgggcatgtacgccctgctgggagtcttctgcgtggccatcttcatcttcttggtcaatggtgtggtcttcgtcctgcgctatcagcgcaaagaacctcccgacagtgccactgaccccacctccccccagccccacaactgggtctggctgggcactgaccaggaggaactgagccgccagctggaccggcagtcccctggcccgcccaagggggaggggagctgcccctgtgagagtgggggaggaggggaggcccctaccctggcccctggccctcctgggggcaccaccagctcctcaagcaccctggcccgaaaggaggctggggggcggcggaagcgagtagagtttgtgacatttgcgccagcccctccagcccagtcacctgaggagcctgtaggggcccctgctgtgcagtccatccttgtggcaggcgaggaggacatccgctgggtgtgtgaggacatggggctgaaggaccctgaggagcttcgcaactacatggagaggatccggggcagctcctgaccctccacagccacctggtcagccaccagctggggcaacgagggtggaggtcccactgagcctctcgcctgcccccgccactcgtctggtgcttgttgatccaagtcccctgcctggtcccccacaaggactcccatccaggccccctctgccctgccccttgtcatggaccatggtcgtgaggaagggctcatgccccttatttatgggaaccatttcattctaacagaataaaccgagaaggaaaccaga

SEQ ID NO: 108 - DNA, 49167 bp, Homo sapiens
acagcgctcgcgctgctctcggcgctcgcagctgccgactggggatgacggcgggcaggaggagaccgcagccgaagggacacagacacgccgcttcaccagctcgcctcaggctgcccccctgcatttttgttttaatttttacggctttttcccctctctttcttcccttcctcctggtcccagcagagccaaggaaacccacaaaataagaaaggaagtgggccccggagcttggaacctccacagccggcttgtccagcgcagcgcgggggcgggaggctgcgcgcaccagttgccagcccggtgcgcggtacctttccttacttttcttgaaacagcgatcgtgcctgcatttggtggttttttggtttttgtttttttccttttcccgtatttgctgaatctccactatccgactttttttttttaatcttttctttccccccccccccaccccacctctttctggagcacgaatccaaacattttcccaagcaacaaagaaaagttcgcacgctggcaccgcagcccggacaggctggcgctgctgccgggcccccctccctccgacacttgactcaatcctgcaagcaagtgtgtgtgtgtccccatcccccgccccgttaacttcatagcaaataacaaatacccataaagtcccagtcgcgcagcccctccccgcgggcagcgcactatgctgctcgggtgggcgtccctgctgctgtgcgcgttccgcctgcccctggccgcggtcggccccgccgcgacacctgcccaggataaagccgggcagcctccgactgctgcagcagccgcccagccccgccggcggcagggggaggaggtgcaggagcgagccgagcctcccggccacccgcaccccctggcgcagcggcgcaggagcaaggggctggtgcagaacatcgaccaactctactccggcggcggcaaggtgggctacctcgtctacgcgggcggccggaggttcctcttggacctggagcgagatggttcggtgggcattgctggcttcgtgcccgcaggaggcgggacgagtgcgccctggcgccaccggagccactgcttctatcggggcacagtggacggtagtccccgctctctggctgtctttgacctctgtgggggtctcgacggcttcttcgcggtcaagcacgcgcgctacaccctaaagccactgctgcgcggaccctgggcggaggaagaaaaggggcgcgtgtacggggatgggtccgcacggatcctgcacgtctacacccgcgagggcttcagcttcgaggccctgccgccgcgcgccagctgcgaaacccccgcgtccacaccggaggcccacgagcatgctccggcgcacagcaacccgagcggacgcgcagcactggcctcgcagctcttggaccagtccgctctctcgcccgctgggggctcaggaccgcagacgtggtggcggcggcggcgccgctccatctcccgggcccgccaggtggagctgcttctggtggctgacgcgtccatggcgcggttgtatggccggggcctgcagcattacctgctgaccctggcctccatcgccaataggctgtacagccatgctagcatcgagaaccacatccgcctggccgtggtgaaggtggtggtgctaggcgacaaggacaagagcctggaagtgagcaagaacgctgccaccacactcaagaacttttgcaagtggcagcaccaacacaaccagctgggagatgaccatgaggagcactacgatgcagctatcctgtttactcgggaggtaggtccagccgggatgcgggggtcccagcgctgatatcaggaggtaggtagaagggaatcttgctggtggctttgcttctccctcaaacctcctgcagctgtggatgtgtttaactgcttcttgcaggaaatccaaccagccttcaactctgctcctgtattcacgttagccccgcagaaatttttgccttaaatgccaagacttgcttaggtgatgatgaagacccagtagtgctgcatgtcatctagtctgaggtgttgtggcataggaacgtaaacataagaaggcacaaggatgcttggggaaatgatacagttaaatggggaaaaggaaggaaaacaaagttgcctttgggatcatgggtcttcttctttccagtgaaaataaaatataaccttgtcccacctaatggaaagggctggatggttcactcacggtactcactgttatccgatgaccttcttttgtaagtgtccacacctttttactagaatcccttctgttacacagaggatgagaaaactttctcaaggactctttttccaggttggattcctaatggagttcttacatgtccaccttggaatctcagttcctgggaaggaaggaatgtgggcgggccagcagggtacagagacccaatcagatgagaggacaaacttgtgaggttccttaacaactcctttgcttagtcgaccagtgcgtcgcaagcactgcccaggccaactccgccgcctagggagggtcacatcccgtttgcgtgtttgggttttggatgaatatgtttccgaagccccagtgcagaagatctgggcgaagagtcaagacagaaggaagaaatgttttcccagcatttcccccttttaagaaagatggttatggggaagcaaagaaatggatctttaaggctcagaggctcagggaggaacgcagtatctatttacacagtatttgaccactacgttagtgtgacatttacacaaaaagtctgggttggtttggggcctggcttgcgcatagttctaagcctcagttgtcacaactcgactctgattggcagttttaagttgtgcctcttaaatgcctggtaagaattgacttctaaagctcattctttaagtatttgagacccatccagaatagattaaggattacaaactttgaagtattatgtaaaatcatggtatgaaatgaagcaaacagaacaaggataggaaattaaatgatggattgcagactttagaatcacacagcttcgctacctaattcttctatttttactaaggcacccctggtatgaaggaaaagtgttgataaatttggagtagagaaacacttgtggttcatagggtggacattaatgtaaaccacatgtaaacaaagatgctggagggcggcagtttagggagagccaagcagcgcgcagtgctgtgcacaatggaaaacatttttttcctcattaagtgattttctggaagccatcctttaattcctctgcacaacattagtctttgaagcggtagaacattcatttgtagccttctctgcaaaatgaagttctgtaaaactatccatttcttgttaggtttccaagctcttttttttttttttttttttttttttttttttttttttttttttttggtaagcaactttccgtgtctggggttccttgctctgctacatcacaagaggatgccaagaaggaggctttggagagtttatggaaggaggttctctaaaggaagaggaagaaatacttttgtaagcatactgcgccaaggagtgggtcattttagtagttcactttcatttttaaacacaaatccacatttcataattttaaaataaataaaaattaatagaaggtctgttacttcctacctcctgccccataacattcctaattgtttcccagaaaacaggaaactactcagtgattctcaatgatttgtcgattactttttccgaatttgttttttgtttggatagttaactgtccctatttttccaaagtctgaaacttaacagcatattttaaatagatacaaagcaagggacaaataaattaatggtccatcttaatttttgtcagtattataaggacatgcatttttcaaactagtctacacatggaaaatatttcacatgggccctctctggtctccttgccaagcagaagcatacttttaggaaaacaaatttcatttgtggttggccctgtagtatacacatctaacttcacaagaagcaaatatttgaaatgcatgtgtattttcaatagatgcgcccaatttaaaagagtgttactaattagggggttgaaaaaaatttcaaggcatttatgcagcattcatttgagagtatttcacaatgcaaagtgaactttgcctaatacttcagagcatgaaaaaaaaaaagaagtctggaggagagatgatctgaggtcttccatctcatgaaaatcagattatcttaaggcccaaagaaaagctttcagagctatttccttttcaatgagaaatacccagagttggcaccaagattctacttttacaactctgttttgaatgtaagaagtgcgttgcttagcagccagacgccaagctatgaaatccatgttttgatgggctctgagtcctgctcaaatttaggtccagatgtcttctcctaaattgcttgttttttaggcatgaagcgaatgtacgaggatatgttttctacctctgtttactagctgaggccaccttgaaagttgcatctggaagtcagcagaatagagctagtaactcatttatcaaacgatcacacttcactgtcaggactgtacccagcactccagtactattctaattagagagagttagcaccagtcaatttcctggcataaaagctgttttcattctgaaatggcactaatgctggaattcacaccacttctgccatcaaacagtagaaatccaatctccccaggatttagctttgctttccagaatcctttccttgttctggacgtcctcttttatttcaagataatttcttcaaagacaaactcttacagtcgtttttttttagaccatttgctctttagaaacaaaagcctacctgcttgataacaaaataggaaattgtttaatatccctccaccccttcatgaaagcagcaaaaaccttactctttcatagattgaaacactgaattaaaatcgaaccaactaagagattgtgcaatataaaaagataattccctttcattaactatcaatatgccagttgatagatcactgtctcagctaaaactctgtacattctgccttagattgctgggaccgggtctccccacacggcatttctcctttaccacgtggctcctggcttgattctgacaacagggggcagtagaggaagaccagaagtttggaagagggagagggatgggctttttcttattggcttgctgcctggactaattcagtcacatatttgagctgaaatctcatttaaagtcaaaagtgaacccttgtcaaggaatcagagcctataggtcaatcctaatcaataaaaggataaataactcagaagtggggagactggtagcagactaagcagctctaattaacatttttacaataaactgtgagggatattatgaaaaatctaaaatctgtgcagtatctgcctacatgcacctcctatgtgtgagactcatgtaggcagtttaaggcagcgaggtagaaatacctgctccctgcccactaggcgtatccccagcagagtggaaacagatacacgtggaaatcacactactgttaggaaaactctgataaatcccatactgagatataaacaaagtctgtgaaaggaaaaggaaggtaacagttaattctgcctatggacctttctgtaggtctcattgcaaatgtagaattgaattggtcctcaaaggatggatagattggatttagattcagccagctgctattgagcatttcttatgtactatccatggccacaaactattttacaattaatcatttcaacaatctgtaaccattgtgtaattatcttgacagaattcatgtgaagagaaacaaagataaacttcttagactaacagctaacaaatggcagacagagaagacagtcctgtctagtgctctctaaactaaaagcattatcactaatttattcaaacctttaatatgctcctcgtaggcaaggagggattcagagatttaaaaagtagcccctttcttaagaatctattcctggaaacagacagggaaatggtcattgctgcacagcatgatggctcttacagtagatgtatttgtaaggtattatggaagtgcattagaagattgctcactccatctgagttcaattttgaagaaagagtgggagttagccagatacgtaaggaggagataggcattgcagacatcagcaaaccatcatgttcaatgggaaatggtaatagattagtttggagaagataataacaacccaactatggaaaaacaaaactatacactatgtctgctagtctgctcaggccaccgtaacagaatattgtacaatgggtggatttaaccaccgaagtatgtcttctcacagttctggagtccagaaagtccaagaccaaggctccagccaatttgatttctagtgagggctctcttcctgtcctataaatggccaccctctcactgtgtactcacaaagccttcccactgcctgcaagtagaaacagagtgaacactcttgggtatcacttcttctaaggacactaaccctatctgattagagtcctgtcctcatgacctcatttaacctcatttacctccttgtaggccctatctccaaatagatgagtttggagaggacacaattcagtctactccaccatgctgacaagttttaattgtaaattaagtgcaatggcaatcattgaaaagaacattagtaggaagacagcaatgatcagaggtgtgttctgaaatgaaccttctggtctaagtagtggactggatcctgggtgagcaggctgtttcagaaatcttcaagaggaggctcaaggtggtctaaactaaagcagtggcattaggaattgagaggcatagattgggtcaagaaatgttaggaagaggtggatgtgagtaaaaattctttgtagcagaaggaatgtcttgggctgagcttcagaggccaaaatattcatgagatatgcacaaaatagtggacagaatggagcaggaaggtacagtggaggcagacagaaagactgaggctgtagtgtgccaggttttgaatgccaggctaaggctgacatgaaggactggaggaatctaataagatctgtgctctaagaaggtgactgacttgagcatatagataaggaagttacaggaggaaaagggaccagttagaagtctcgggttataattcaggcaggaaataatagtagaaaaaaatgagaaatagaggacaactacagtgacttacagtggctaattagatgtgacaggtgagagaaggaggcgagttaatgatgtcaccagttttcttatccagtgcttccattttcttgttttctggaatatctttcacagtgtatttcatatatttagtatacctctaaattatctagtttttccaacacagcatagagagaaaaccaggatattctttatttgctgcaagaaagaaatttgcttaatcaagtgtagattatgaatacaaaagataagattaatgtcaagaataacgtatgtgatgacttaacaaaaccatggtgaagtaagttcaggattctgagtgtttagatacaggtttgaatttcagcttcagtatggacaaacttgagatttggagcatttaatgcccctgagctttaatttctttataaattggaatgcttttagttaatatcaggacatgtgtagctggaacaaaccctagagatgacctggaccaaactcctgatgttaatgatgagggaactttgtctcaaagcatgtaaatgatttacacagtgcttctcactaacagcattgaattaaaaagcaatctaccttccattcactctctaaccagcttccatttctctttaccagaatgactccgtcaagcatctactcccctgctccctgtctccaacttgctccatctcttcttccccttcttacctcacatttgtcagagaaagcttcctgacttggaactctgggcccagactctctttccagcttccctgctagccctctgctcaacagatcctgtgttccagccaaaacaaacttcttgtcattcccaaaagactctgccttttcccattccattatgtttccactagtccttccttgccagagtatccttcctcccaggctatcagatccactcacttccgtggagacacctttatggattccctcaaggagaattcatcaatgcctcttctgttctccctgaacaatctgttcataatggaagtcacagtttgctttgttcttgacatatctgttttgctccttagagcctgatgttccctaaagctcaggatcagatcttatttcatctatttaccacagtgtcagcacttccacagtgtctggcagattgtaggcacacaataattgttttaggaataaacacgtctggatctctgggaccctaatccatctgggctctgtgtgtttggtatcccttaggtgtatcaagagacaaggatagagattgtataaaatgggtcatcgtaaaggttggcataacagttccaattaatgtagtctctgctgaaatctaaaattaaaacccctattattggggactgctggataggtagccagaaaggcaaaggactcctcaagaatcaagaatcagatccacagaacaaatatgcatgcgtttgtgtgtgtgtgtgtatgtgctcttcccttgagctccatgcttgcccttaccaaggggtaagatctatagaaacagaagttgctattatttaactctgatataaggtgttcttccttaatttcagctgctgtggctgcagctgtgatggtatctacctgtgtcagcatttgtgttgcctctggctccctccctcagcgtatttgcactgcatgtgaaaacaatctctcagtcaagacaagaaatcctatgattcctgtgatttgtccaccttaggacatttgggtctgactggttcattttcaccacccagtactgcccactgggattttcaaagttcacactatcttctgagcatctgcttctcaaggcagcatcctttactggctccctgtcccccatcccatccccaagaagtgcccagtagatcttgggtattattacggcttcaaaattctgtgataaatcacaagcttggccatatttatagtctcctaaaaggtcatacctggtgaatggtcacagtgtcaatgaccttcctatcgaatctctgctggtggtgcagaccaccatgaatacacttctgagttagatacaatgtctcagtcttgtatcctggccaacaccataccacaaaaccactagataaatctctgcaacctttgcaaccttcatattttactaaatcttccactgcattactgtccacacagtagtgataagatattgatcttgcataaaacaagccttatttgatatgacaaagataatcacttaccttcagatctacactgaacaagcagataagcttttgtcagaacttttaattcgtttacctcttacatggtattgtatgtgattcacatctctccagtatctcctgcttccaggtctagattatatctatctatctatctatctatctatctatcatctatccatctatctatagacacacacacatatccgtgtatcacatatatgtgtgtgtatacatacacatatataatagcaaatgtgtatatatgtatacacatatacacatatactattgccccaataatatctttactcctgctcagaatttaagaatttaagaaagtattctataaacttcaaataaggtttacacctataaatgttgttagaaatcatcaacagaaagtagacatgaatgcgagatgctgtattcttaacaatttgacgcacattagttttaattcattgaaatgaacattgttcacaaagaaattcagatgttcattataagccttgaggctgaaactgtaactgtttgccaagatttgaaattgtgtgagtgaaatggaaaggttgccagtttacataattatagctacagaaatatatagtgtggctgagtagtcaaggagtttaatcagtgtggttaaaaaaataacaagtgcttctgttcataattttgtcacatttccgtggcaaaaggccaaatgcatttaatccaattcaaggatgacaaggagggttgatggcctctaatgagcaattgattagcagtaaacagagagatattaagaatctagtttaatctctatcgagaagaggagggtcatttccctttgctgtggctcttcatcttagcttatttatagagtaagaagggaaaatgtaattcttggattttattatttaaagataaataccccaaattgtgatataaacataaatcttgttttaaaaaaaatgtgtgcagatataacctagagtgtctagcagctcccttaaggcatgacctaggtttttggtcctagagatagtgaaatgattgtgggggaggggcttaaaaatgtattgtgctacattattatctcaaagactgattattatgcaaaagtgtgttccaatttcaatttgaaaaactactgatttgtactcaacagctgtaatttggcatcccatgggatgacatgggaggatatacaggaaactttggaaggctgttggttttgtgacatgattaaccaaggctacttggctgagatttccagtgtctaaagctacagtaacttggtggccacactgtaacttatctcagctgggaactcataataaacagaacacaataaggacctgagaatgaagttaagagaagagaatacagctgagtttctaaatactcttcaccttggtaggatttttatgcagcaaaatagcaaagggttagaagagtatgttgccattgagtatgtagcactggttatgtagtcacactgccttgtactggttgtctggagcctgctgaggtcctgctggcatacagcatattaaagatgtgggagcactataatgtatctgactgtaggtcacaactcaatgaaacaaatgtttgctgagttcctactatataagctggagaatatggaagttgggcatacaaaaatgattgttgtataatagaaacatttattattttaaccaataaacagttgtctttacaataattagtatatttttaaaacttttccttttagagttcctaacttatggcttactagaaacacgatcttgctctttgggaatataaatgagcacattgttagtaaattttcatggaaaattgtggtcaagcacaagaaatgctaatgtccattaatactcaaatagcatttaaagggaaagtttatcattatgaatctgtcatgtcaaaaagttgcggcttatattttctctttatgtttcatatctcaagaggcttgttgaggtccctttcatctaaattgatcatttttcaccattattggggtggaatcatgttcctatttgagaatctcttaaaagattacatgacatctatgaaaaactatgactttttaccagaaaaatgcatatattcatgtatacacaattaatatatgacatatattttctgcagattggtcaggttgagaaatgctacattaaatgttatgagtaagaaggtacagatttcagaagacacaacctatgaaattacagctcatttggggagtaaaagatgacctttcctcaaattatgaattaaaatttagttttctatccaaatttctaataaatttatactctgctgcagacgtctggctgcagtttgcccctgtaatagaaaacaaattataaggccagattttgataaatttagcatgaatttccatcagaattttaggactttcctaagcatgaccatatgggaaggtgatcagagacgtatctgcattacggctttgttaaagctgcgggtgctattgtaatagacaagttacaatcctaagacatctttttaaatgtaattgagttccattatccttctgtgtttctgggccccagagcagttcagaagagtctctgccttgagtttgcctttggaacgtttccagagaggaacaggtgataccataaacatatccctgttgccatttggggtaagcaagtggctctatgtggcggctccttctggatgtaaattgattttaatgatttctttctttctcctgggcaggatttatgtgggcatcattcatgtgacaccctgggaatggcagacgttgggaccatatgttctccagagcgcagctgtgctgtgattgaagacgatggcctccacgcagccttcactgtggctcacgaaatcggtatgcagcgccttttcttttccctcaccaaatcaaacacttgtaacagctgcaacaggaaccaaaatacttagcaattaattccagatttctcctggttcagatgtaccactgggaattaaatttgtttatatctgcacttttaaggttaactaatacgagcgacagggaaggcaaagtcagcaacacggtggatgttttcttctgacagtgtcatttaaaagttcaagagaaatttgctactgctactgccttcttactatctttttaagcatccgtaaatgacccctggatgaaatttgtcacaggcaactttggtatgcagagatgtccttcttagaagttactggagacagtactggctcatccagggctaatcagtttgcacagaaatttaacatgttttatttcattgtcagtgataattgtaggctcctgtcaaaggtcatcaatggcttatggtaaatatttctgtcttgttcttaatagcaaggaaaggaagccaagcctgacactcaacagggtttgctttaaaatgtcacttacctaatttgtttgttgtaagaaacacatctaaatcctacatctataaatagaggactgagttgattgctaaaaaatatttccaaaataaagaatatgtgcttcctaattattgacctagattactaggtgtatgagaaattggcttagtacatttaggactagatgttggaattagacacaattttttgtgtctaacttttttctgtctaattccaacatctagtcctaaatgagcccaatttttgctaaattactttatacctatgtcacactggtctaattatttaaactctctgagctccagttttcatatctgaaacatagggataatagtgcctatttcagggaattattttggggaatatattgggtagagtttagatagtagatgttatttatatccacatgtacttatgttttgctttttagctaaatagttcatttgcttttgaaatgtatgtatcaactcagcatcacatttttgggagcaaagcatggtttgataattatggtaccttttgccatctatagcaaaaaagattttgatttaaacagattttgatttttaaggttaaaattataacttttaaatgggaattaaaactacttttttacattcctaataggcagagaatattttcacaaagcatccatttctaactgctatgttttctttggggagttaaataacttctaatccaaggtacagtgtaattgcataattcacaatattgccgcagtaaaacagaattcagtagttaaatgtcagttcttaagtatggcattaatgttcctgacacgtttcttacctcctaagcagaaaaacacaaatataaaacctaaacgtaaataattatccaatagcatcactgagaataattcagtgttttattgattaggcgtctttggcttcagtagtcaaagatctgagtggagtcccagctctgtctctgggttctctgttttatctcagacaagtgatttagatactttgagtctccatttcttccctataaagtgggctaatgaggaggcatggctgtcttctcagctgcactagaagaactggtcagcctgaaagcgtctttataacacatgccatttaggctccagggtagggatcatgtctctcatttatgcctattaatccttactgataaaaacacagcctaatacagaaccttaatcaatatttattacgtatctatgtatgtgcttgactgcgtaagcgggagaaagaaacatgagacttgctcaaggcaacattccgatctgcaccggaaactaagaggaattagtccaaatactcaggaggatgtaattaaatagaggagacttttaaagtacactggtaattaatcaccatcattcagagtgagaggagtcccataagaaaggttctaagtccctggaaaggcagaagctgattcgtcacaggtcaagcggagaaattatggggaataagcagcagagctgaatgttggcgtcatccatccacaggattatgggctccaaatcttgatcttcaaaaggaaagattccacattccttaaaggaagggcagtttctttcctttctagtgattggttttcacacattgactgcatctgggagatttccctgtaagacaaacactgtggcaataagtgcagcttcttcagggatgctttgacctcaagttaactagggaggattgaagagccctgcagggtcacctttcccagctctcctgaattcctaaggcaatcttgggttacaaggctgatgcagcagtctgagaggcaggaagccagatgctgataagcacaaacgttatattaaaactaaatatatacatgtgtgtgtacacacacagtaagaacttttctcaatagtacaagaatattagacatagttatacaaggaaacaacgtaggagaaaggtgggcttctgtatgaaaactaaaacctaaatctttgatatatgattatgcccttctgtgcacttaaatttttggttggatcatctttgtttatttctttagaagtccctgtaattcattgcccaatcaaacactctctatttaacttcccttttgtattacatatgaactaatctgagctatttaaggtctggaagtgggggaatatggattcaattctgctttcataaaagaatctggttctcattcagtttattttctaatctctttattattctttaatttcactttttgcctaaatattatgaacatgtgttataaaaaataagccttcaacgtttaggaaagatagcctgacaaaagatttcctgatcatctgtgtattattacagagtcttgcccctccagccagtgtgatcttggataatgcagcttgctggtttgtttcccgtgctgtattttttggattgctgtgtgaagctctcagtctgagctaaccatgctctcgattctaattctcaattcctgcaatcttctctcttcctaattttttttttttttttttttttttttttttttttttttttttttgagatggagggtcactcttgttgcccaggctggagtgcaatggcgcaggctcagctcactgcaacctctgcctcccaggttcaagagattctcctgcctcagccccccaagcagctgggattacaggcaccaaccaccacacctggctgatttttgtatttttagtagagatggggtttcaccatcccccttcctttttactagacatttgtgactttctagatttggaagatgtgtatatggtcaaagtatggcgatgaaaatgacgttttgaatgctcagttttccagtgttttaaatttactctagcctcattccaaaatgtgtaatttcctttatgcaaacagtgtgaatgtgttactgtgctcaaaacacaagctaggagagattcccaggctgttcccataatttttctactttatttcttctataagcagtaaaaggatatatttgagcaagaataactcttccattaacctacttacaggttctcgtggaaacgcacaactgtttcctctttctcttcacagtggtttaaaatagaaagtcatatctattttgtgcatgaataaactgaatcaaaattttctttttagttcattaacagcctgggcaacatagggagaccctgtctctacaaaaaattaaaaagaaaaaatagctgggcatggtggtgcatgcctgtagtcccagctactcagaaggctgaggtgggaggactgcttgagcccaggagacagaggataaaatgagctatgattacaccactgcactccagcctgggtgacagagtgagccccccacctaaaaaaaaatcttaccttgataattaactcataaggtaaatagaggcagagctgtagtctctatctgacaccatttctacccacggcattaaattatttgaagtcaaaatgacacaggttaaaaatgaacaattatgaaaacttactcttttcatataccatttgaaactagaacacttctttttttctgctaattctttcaaaaaagctgctagattttgaaggtaactaatcaactgatgccaatacagacttctggaagatggatattgattgacattgattctggataggcagtcaaaaagtgctttccttcttgtgttatatgcatgtaaatgttggctaaattgttaagacatttcagaaagtcacttcaaactatcaaaaacacagtccccatccatgttcctcgagtggaggcaggaatgtgtttacagccactttacaatccaaatgtgaactgcagaaagttttcaagttagtgtaagtttacattttgagtttatattttaacttgtcaaacttttattattgacttgtaataataaagatttcacctgctgcacatatggtccttaaaaacaataattttattgatgttgggccagcttctaatacactaggaggaacaatctgattttatttagacaaatgaaatccataatttgcaaacatgccgaagctttgctttatagtggttaattataaaatgcactaagtgaatctctctactgtgaaagactccagtgtgcttcctaagctaaactcaggcaacttaacaagtcaagaccaaatattcagctgagacttaggaagtggttgagacacaacagcaaagccgcctgtgttttggtgtggttaaaaggtgttccctggttgtgctgatctgtgtgtgactctgcttctgtagatgattagattaaacacggccatattttgaaaagctgcagaggttcttgaaacaccacagaccaaatccaaatacacagaatcagatgtccaggcttgttgtaagatgtaaagttcgaaggaaactaggattaaacttgatattttcccgcaaacccattgctttaatcaacaagcagtttggaggaaagccacactatgtctttcttggcccccaaataaaatgtgggaataagtttttgctatatgttgaggaatattgagagattttgtgtctattgtcagtttttaaaaacttaatcccaattcatgtttctctagggagaaacctatagattatctagcacatgtgtggaaaccagcaaattgaaggtggcataaaaagtaactctaacacacacttgctgagtgattttttttcttttatgtttaggaagtttcctcttccctcccacataaagagtgtctagtaatatcaaagcttgttggctggtgtggtggctcatgcttgtaatcccaacagtttgagacaagccctggcatcatagtgagaccctgtctctacaaaaagtaaaaaaataaataaataagtaataaataaataaattagccaagggtggtggtgtgcacctgtagtcccagctagtcagaaggtatgaggatcatttgaacccaagagatggaggcttcagtgggctttgatagcatgactgcacaccagcctgggtgatacagcaagactctctctctctctctctctctctccatatatatatatatgtgtgatatatatatatggatatatgtgtgatatatatatatatatatcactgattactagaatactcataagtaaaagtatataacaatcccagaatatcaatgaggacaataaagttagctaacaatcactggtcctttgatatatgtcaagcacatattctaatcactttgcatgttttatatcatttaattcttacaaaatgccatgaggtaagtaccattagtgggtcacccaagagagagaatgaagctaacacacagggtactttctaaacccgtctaaggtcaacaactaatatactgctaaagtgagattaaaacccaatccatctggctccagagctcaagatgtttatatgcttctagaatgtttttttagacagtttttactttaaaggctataattctgaaatggattcaaaaggatattgacacagctagttataaggtgaaaaagttagagtttcttccttccaaattacataattgataccacatttaccattcatgtttaatgctttcaaatgggagttataagagttttatcacatctatgtaaagattcgtgtttgaataagcatgcatgatccaatgactggagctcatggttcccttcttcaaggattctagattctgattccatgtgagcagttgactcacttttcaacccctggcaagaccgtgcacctccataatcccagctggaaaattaggtaaaataaaaacatgacctcattaagaaacagatgcttcatctgagcagtgctttcccgagtaaacacattacagagcttcttgtgacatttttttaggatgtggtactgtgtccccttgaccattggtcagtttgggatcaggagacaagagcttgaaattctgtttaatttgcagaccaaagtttagaaaaacaaccaatttccttcctgaggttaatgttataagtcagccctggttgtacagtaatgcctgggttgaataagaagctgaaccaacagtttcctttaaagtgatgtgtcttcatctggctacacattatcacagattttctaacaccagattctcttgtgaatttaatgaagcaaggtgttcttaaaatctgtattgggaatatcaaagataacatttattttataaaatgtcacccctttgccaattgaaaaagagaattttcataccagaaaagttatcaggtgacgatttgtttgctatttctgagctaacaatgtaactcaaactctcagtcctatagactttactctgacataatttatcattacatttaatttcttagattaattcaaataaactcctttctgatgttacttgctgacagacactcagcatgactgttgtatgatttaacatcaattaagaataggtcaacatcatctaacacaatttacaccttagcttttactaattatttcaaacagcgaaatacagttctgatcgggcgcagtggttcacacctgtaatcccagcactttgggaggccaagacaggtggatcaactgaggtcaggagttcgagaccaccccggccaacatggtgaaaccctgtctctactgaaaatacaaaaaactagccaggaatggtggtgtgcgcctgtactgccagttactcagaaggctgaggcaggagaatcacttgaacccgggaggtggagattgcagtgagcagagatcttgcctttgcactccagcctggacgacaagagagaaactccatctcaaaaaaaaaaagaaaaagaaaaagaaaaaaagaaaataaatatagttctgaggtaggcaccgcttggaaaatactcgtggattagacagttgcattattctctgaatttcactctggcttctatctcccctccccagttaaaaccctatttagcatataaatacagaggtcattaacaagtgcatctattacacaagtgtgtttggtccttagttgcctcagggttttaggtgaaaagcttccaattacatcatcaagaattaaagatagctgagaaagagtattgtaaacaaaattgctcaagcaaactgcttttcgatcttttgcatgtctgctgattataaatggtcctaaacacaaacactaattcttccctaaagcaagacttcactacctctgctttaaatcctgacagcagatagttacctcgaaacccacctctgccttttctctcactaggagtttcacgtcctattttagtgagggagcttcctcagatctctgtcaaaatggctttcagtcctccccacccttctcttgcaacactctgactctccaaaaaagaactctttctctttttccaagggtaaggattgccattctatgtggatttctcgattccatccccctgcctcctctaaaacctcaccctcaactaactctgttgctctgtattgctctaaaaactcatcatgtaatacaatttgatgtaaacaacaaattacttttggcattgtacacattttctccacactcttttatattcttcatgtgctgttttactctctgagacagggatatctaatcctatctgctgctaatgctcctggggtctgcttgtccaagaaatgcttaatctccaaaccacaccattcattttaaacatctctgtgaatgatttatgaacaaactctccctgaaaaggcagatgtcttcaaagctattagcttttccaattccccttcacaatccctacttaaaagacagttgtcagctgtgacactgtattttaaattccccggattctggattttctctggtagttagcttttggtatcatagcgtgccgtctttaccgtgagcactcctttaaaattgcttatacttttgtatacttttgctatttcaaggccgatttcaactaagagtaaatgtcttagcataattgactgggggctcgaattacaaaataccactccttttgctgtttgcagcctttagaatgtgtgtcacgtctttcctgaagagcatccaaacatccctcacattgatcttccctttcatatcctgtccagctcctgaagggaagtcacgcggttctctcgccatgccctggttccagctactctggaactggctgcctgttactttgggtgcttaagtgttcttcacattgcccaggactctcgctgcccttgagagagcatgcctctcccagagagctgacaggctttcttcatggagcacagagtgttcattcgccctcaaaagagtcgatctctttcagttgactctaagcagtctgtttctgcctgacttttggagatcttacaaaagtcacatccccttgctgaggtgaagcaaagatttgttcatgcttgaaaggcagtctttcgcagtgcaatttcctctatgcatcttcagtggcaattaagtttcagtggaaaatgagcaaatttggggagcatagaagtcataatgttatattaactagtattccaaaagattcataaatgatgctgaaatatttcaaaattaaattgacttgcttacataattgaaacctttaaaattacatgcttcacctctctgaaagagagaatgaaggtactttctcaggtccctcaaagtgaatttcgtgtctgccatgtgtcctatattttaaatcagaattctaaaatctaccctccaaatgaagtgaaaatctcttgatacaataataaaaaggcatatggaaagtgctatgtatttatatagatttggaggaaaaggccattacttcattaaataaatataaatatcctatgaagtagaatgtatacatcacattttttaagtaaaaacctggattcaaataaatattatgttgcagaggtcacttggggacacttttcttctatgccagaggaaaaaactcaagagtgaaatttccaccatatccctcagtgttaactgataaatcttctatcttggaaaatttcgggaagtgtagagtgcgatatcagcaagtatttcatgtactaagtaactttaagtcatttctaatagtacatgaatgaaagattgttttttttttttttctgtgagctgtgagtttcttgaaaaactcaacaaaccactcaaaaattagatgagcccctgctaatttcctttgcaagttatttgggacatactttatatatagactataatgcacacttatgctactgaccaaacaaaatgttaagtggtggtgggagaacttcccagagaaaacttgtaagcctagtaaatgctgtcgaagtaaatatctgtataaataacataaaaatgtggaggcttggaaggtcaccgagccctagccacttattttcagccataacagcagtcagttgctcagtggacaattttgttatgaggtgttggtgatttaacaagttggcccaaagtagtcggaatataaagtgaaagatttcatctctgttgggttttattggtgcacactggactcttttgctagaatggccaaagttttctgcgtttggcattcaagatcccaaggagaatgtagtcatcagtttgctacagtgtttcctaaatttgttttagtggtttgtgtatgattctagaaagctttgttaaaaacaccactaggatgatttgctgtctactttttagagtttgtaattgctcaaactactgtcctagatgttttaaatagcattgtaaatttgttgtggaatatcattttatctttagactgcatgaaaattgatcttatgtaataaaaagcaatttacttggattataagaatgcaattatgggctctgtgaaataatatctagcttgactggaacttcagagaacattgttggttgagaggcttaagcacaaatatcacctggctgagtggttttgaacactcacaactatcacttgggaaaccaagctgtcctttcttcaagctctcaaactccatattattggtattttgacattttaaaatgtaaatgggtatgttttcaaaatgagctatatgtttgtgacaatagtaaacattcataactcactaaatcaccaaaagaaatgaacggatgaagcaagcttagttttgcaagaaaccggaaacttcctcatttcacttctctttctttgtctcccctagtcctcccttttattagccacctatttacttgactaagaaaataagtcactgacattcaaaaaccatctactaagtgtttgcaacttgcacagcactaagttcaatacagaggtttcaacagtatatgggagcaaatgcactttgatctcatggggcttgatcagagaaggcagaaaattagacaatcaaaatgatacgtggtgagggctatgacataatcccacaattgtctcgcaaactctagattctaaataaggctttgtttccacatgacattaagcatatgtgatccagatgaattatgggaacatctactctttagtttttcagtttccatcgaaatgttcaccaaaagcaactgctacactaactccatgcaacttttatttccctggaggtccagtctctgggtgagaaagcagttaaagtgaactcatctacaattaggggaaaaaaatcaagccctagcataattgtcatggaaagatagaaatacacaatcacggattatttgtacttcctctgttgtctcccttaggacatttacttggcctctcccatgacgattccaaattctgtgaagagacctttggttccacagaagataagcgcttaatgtcttccatccttaccagcattgatgcatctaagccctggtccaaatgcacttcagccaccatcacagaattcctggatgatggccatggtatgtatcatttaggagaacacagactgagaaacaaaatttgggattcttaggagtttgacttcattatatcctcataatattcatcttgccctctaagacaatagttgtgtggatagtgtcagaagaaagaccaagaaaattgatcatatgtgggtatgtactgccaacgtccttggtggcattttagctatggtattttggcttttgaattgaaaaatttcaaaggagaagcagtgtggaagaccacacagaatgcctagctagtgccctgaaagtctggcttttattccttcttttaccactagcttcctgtgagaactttggcagacatcttggtttccctgctattaatatgactctcagaattatttgttacatgcctattataggggtgcagttaaggtgtaggtgacaattctactggattctctttatggcaacataagcccagaagaggaagctttctagatttgcactgactagaagaatttggttttattctgataggagattctcctgaaagtagagtaaaaactgcataacagaaatagaaaagcaatctgaatgatgggaaaacactttaagaacttcaaaagaaaatctttggctttatccttcaaatatagttcaagagcacaacatactttattaaattctgtaagactaggatcagtgctgtaaattacattgaaatactgaggaagttacaatttttagaaataataaattctgacccctaagtaatctttgaaacaagctgttgcaaatttccaagcattcttcagtactttaaagtaataaaaacacaggaggatagatgcattagcactctaaagaatcatcagacattatgtagctgaaatttcctatgttacagaaatggacatattctcatttattttatgttctcttaaaatttatgtttctaaaactagtagttaaattgaatgtgacagaaattattgatcataataattttctataaaattacctcatgatatacggttcaaagttgaataatctatggcaaccgtctttttcccagttccacaaagtttatgactcaatgtcccataattttttagtatgttgactgtttggaactgtggctacataataccagaacaatggacaaattcaaattatttcagacttaaagaaattcagctgcacagttctctgataccatggagtcaaaatatgttcattaacccattcttgctccattcgtggtgaacaggtaaggctttagctgcctgttactatatatttgcttgtctcattttgaaaagcaatctgagtccagcttggtttaaaatatatctcaatacaaaaaaaaagttcctttttagttgaaaaaatatgtcaataatttaaagacttggaaacaacaataagaattaacgtatgaagctttttccttagaccagtaatacaatggtaattttatgtttagctcagtttacattgtggattaaatgcagataaagtcctaaaatgaatgttaccttactatcatcctatctacattgatcaggtcagtatctcataaagtccttcttgggtggaatcttaagtctccacgcataatattgcttttctgttttacttcttttcaggttttctgaaaataaaataacattaatattttatttcaaaatcacatgttacacattccaagaagttgagctaaaccttgaatcactaaatgaatggatttagttgctaaggcagcaaatacttatggctaaaatgagaccaaatttttttccctgtgcaaatattaggtcagctaattacaatgctgtggagaattttgttcctaattttggaatgattcatttatttcatgtttatggaatttgtgatcttaatttctatgcagtaaatatgctttcagcattgtcttcatttttaacattaattctatatttaaaagagtctatgctctgattttttaaagattttataacaaatttacatatttttatatctgtttctgttccaaagggctcatgatagagaacaactaagaacataattttaatagaaatagatcttgttcatttgcactaataaaaaagtatctaaatttctcatgtatatatattaaataaattcaattatcaaaattccttgagcagaaaatgcttatagtttacttatttgatttttttcatccaatctagactttctcacttttgaatatcttggtttggttaggcagccttttgtttcaataaaaataatcctattttatcagtagcttataacatgaataaagtgatttcagaataacaaaaaccaaagaaaagcagtgtggcacaatgacaaagctcagttatgtctgtcttactttgtttcaaaagagcatactcagattcagaattgaaacagtggtactccctgtagtgctattatttaaagatgaattgaaataacttaataacttttaaattgtaaccaaaaagctcacttaagtcaatgtaagtgaaagtgtggccatagaaactaccaaacccactttagagatgattgaggtgctaacatttcaactacagagcatgggagagaactaagaagacagtcacagtccaagatgatagaataacaaagatgcatctttgttagaagactaaacgatgtcacaaaactatattataaaaccttttaactttactcatagaaagctacacaggcttccactcagagcccatttattagtattttacagttctaccatttttctgttctaattttctaggccactcaatttttttaagcaataaaatagtcatgatggatgagggtggggagactttagacaggtaatctgagaacaagaaatgatattatttaacaataagagaaaggctataaatagcctgaaaacatgaaaggcacagtggtctggtaccattttctaaaggtcaaaagccctatctcaccaacatggtccctcaagttagtgctatatttcagcatgatacaataattgacacacagaaaaaaatgactttcagttatctaggaaagttaaactgtgaccagtataaaggcagaaaagcaatttgctatttttaagcaggtaatctgacaacacatatacaatttttcaatggtacctaaagagtacattataaatgggaattccatttatgtctaatatcttaccccaccccctctcaccttcagcaatactggagaaatgaggtcggagagtaaagttaaattcaaagcatttgatttatttttaaaattattagccataagtagctggacatttgtagcactcgtccactgccaaatgtaaattcattagtactgagtgtttcctgatttagttccaacaagaaatatgcagcaattaggttatggttgaaaaaccagcgtgctcactctaaagtcactgtgtctgcagatttgtgattcagaaaaggagaagccatgtctcatgggacccccctcctcccaaccttggccaagatacttgtagacattctgcagtgtttatacaagctagctctaggcaagctggctaggagtatgatcctcaaaaataaaggtaagcactggcaaagaaattgtgcagtgaaagcaggttattgaatttcctttctcaaatgtttactaaccttgagtccagaaaagatagctgtgtctgctgtatccctgagtccacagtgccagatgatgagaaaggccatgacttatgtagatacagctcaagaacactcacaacacaggttgctaaggaaaatctatggatggttttgaaaattcgtcatgtagtgtaaagagctaagtttacagccacttactgaacacagaactttgcacataaaatgatattggaaaaccagttctctgaatcttttgttaagtatatagactaaagctagccaggagagcttaacatcagtttttaaggtggcattaataaaattcaaagccaacactatggttgtatcttgattttcatactaaatatgctctttaatagagtgtgaaaataagacatatagtttaaggccacggtgacttatatttttaaaaactttcctttatcctctatcacagggaatctttaatttaatttccttgccattacatctgctcaacaatatacctaatgcatctaacagcttcatacccagaccccttgaattgctttttgacaacaattgtctggttttttgaagtgctcttgttcattcttatatcactgggcccagaatgagtgatcaaagagcaggcaaatgcacccatttttcttttaacattagacattcaagtaaagacctaaaagctgaggggcaagggcagtgagatgaagagtggaagcaaagggagattgtaagcagtggtgttaggcttcttcggatgagtttgattaggaacattaattgatttctcctgcatcatgaatatttgggtcatgcttaatttcatacctgcatattgaaaaggaagagaagatggaaataatgttagtgctagaaatagggaagaaaaatttgaaaacaataaagaacaacaactttgagaccgggcatggtggctcactccctgtaatcccagcactttgggaggccaaggtgggcggatcacctgaggtcaggagtttgaaaccagcctggccaacacggcgaaacatagtctctactaaaaatacaaaaatcagttgggcatgttggcgcatgcctgtaatcccagctactcaggaggctgaggcaggaaaatcacttgaatctgggagatggaggttgcagtgagccgagattgcaccactgcactccagcctggacaacagagctagactccatctgaaaacaaaacaaaacaaaaaaacaactttggttaatcattaatatgagagacaaatagtgctataagtcagacatatgaaactagagatttttctgttccatttcctggaggcgtggcattccttccaacacctttagtggaattctgccaacacattttcttactggttcgcctcaaatcacaacattttactttttatttttttgccttattttaagcatttagtttaacatgaatggtaaaaacatgtatgcaatatgcacacattcctattgactttctttcttttctttttttttttgagacggagtttcgctctttgttgcccaggctggagtgcaatggtgcgatcttggctcactgcaaactccacctcccaggttcaagcgattctcctgcctcagcctccctcccgagtagctgggactacaggcgcccgccaccacacccagctaatttttgtatttttagtacagacagggtttcaccatgttggccaggctggtcgcgaactcttgacctcaggtgatccacccgcctcagcctcccaaagtgctgggattacaggcatgagccaccgcacctggcctgactttattttatagtctatccatttataaatatacaatgttaaaacaaaaggaagaaggagggaagggtcaaagtgttcccaggaagatccagatcaaatttcagactacgatgaattagaaaatatgtgaagtagatgtgaagaagtggttgagaataaaattaaaacagattaagaaaaaaatcagcactaggttggatgcctctagagctcactagaaatgatactgaaaggttgatcagtttccccttttactccttccccaaactgtatacatttcttaaacatataaaatgtatatccaatctgttattacttagattttaaacattttatactgtgagtttcagacttaggctctgtattgatttttgttactgtttcttggcaccattctgccatttggtagagatgcttgtacctattttgttgcaaaaggacataattcaatgtaaaaattaaattatatatgctttggcataaacagaaattgatgcagctacaaatcctagtactgagaacattggcataacacattaattgcaattctgaaataaattattttattttaagcaagagaagatcatctccacatgtatgacctctaagggaaaattatagagctgatatatcttattttgaatagaaagctaatgtgttatttatttttaaaacttacagttctaagttaagctttttaaagagatgccacatcttgaagtctccttgttggaagccgatttcaaattgcattacacgtttctttttcacttgtcatctactagtgaggtagaacaggtgtcagtgactgtgtatgcatagtcaggtggtgagttattttgactccagaaaaatgagatagatccatgccatgtgcatgcacacatggtaaagacttcctagctaatatttagttacccagtcttatggtctgtgctttttagtaaaattttttttaaaaactttcttaaaacagcacttttgaagaactggaaaacattattgcagactcagagatttgttgacagtcttctaacatcagcaatctgccaagcatcccctagtttacacagtacttcttttttgattctgcaatgaagataatgtttttcgtggagttctgaagccctaatcgcactctgtcttataaacaaagcttagtgagcttttactatcattctttcctatcggcttgatgttcgtgtttttcttttaacttggtgtttttctcccaaagttctctttggctggattcttatttttaatgctttttctggcttgccttaagaagctttacctcttcaaacgttctggctcagaagttaaataggaactttgctctttattcatttttatataatgcccccaacacagattgacaaattctaaggtattcactttgaagaaatttgaatgtagtccttaaaaatttacagtatacttaaaatatgctgaatattctatttctcagtggcacataaggatttgaatatgacttttttgttgaataaaaagaataactgtagtacatctaaaaggctgttaaatatactgggatacaactaccattgctttgtatttttctggtcacccttaagatctttgttagctaatttcacatttacagtatcacagtgagaagagaagcattatgcagatcttgaaaataaattagggagaggttagctaacttagccaggagcactcaaccatttagtatttcaccagagtaagacttcagactgggtgtttcttccattaagctcaatatctaccacttaaaggatccttacacatggctgcccttcagcaatacaatcaggcagctactcacatgctaacagaagccatatggcatcagaagaaaagggcaggctctgagcatgaaaccataacagctgtgtgaccttgggtaactggtctgcctcctatgggcctcagtttccttatctgtaggataaataaaatatgcactagaatctgcctgatggggttgtggtgaggattaaatgagctcatatatgtaaagaatggagaatagtgtgtgtaacaaatatttgttattttattgctattataataattgtgtaaatcctaaaataaagtaaacagaaaaatacagaaacagatgggcaatatgcatgcatatgtgggtgacaaaagaaaattaatgatgttaactcaccggacagggattcttagggaagcttttgcggggaggggaaggagaggaagaggaagcaaatttaaggttttggattctcatcgtccatgttccagcttttgtggattccccatctcacccctctgcctgtacaccctcatatatgatgcaatgagatgcctaccttgtttcggcagatagatccaaatactcaacaaacaccaattccattaaatagacataaagcaaagagtataaagactaacttaatcctaaattatcaaagactattttttcttttttcactgctcctttgttctgtgaatcttgaaaactttttattaaaattatatcagtctgagagaaatactttatctctgtgactttattggaaggccttcaaaggtagatctgggtcatttttctgtatttcagatacctagtgtgttttctagaacattgtaggtgctgaacaaatgcttgtcgagtgactgtaagaatgaatgaggagccagcttggctattatttatggaattagtggaaaggagacatgtgataggcacatggggaaggggtgagttagaaatgggtaatgggttatacagatagagtgccaaggacaaactctgtttctcaaagtggtagagtaaatgcttcattatcattattattattattattaaaattcaccatctgattttctctaggtccatcccaattttgtttagtgccttagcacaagggctattttcacaactaatcattacagaatcattttattccatcacacccctgccaacctcacctctgttgttacagacactccggagcgcatcactcctgagaaccctggagggtctggtgcgtccaagggggctcccagccttgtccccatggagtccctctccagagcattacactacagattcatgggtgcctcgtgctccaacaccagccggggcatttcatttttagatccatgattttagcggtttgaaacctaaacacagagccgtggtcaatctcagttattcttgtaggtaactgtttgctggacctaccacgaaagcagatcctgggccccgaagaactcccaggacagacctacgatgccacccagcagtgcaacctgacattcgggcctgagtactccgtgtgtcccggcatggatgtctgtgctcgcctgtggtgtgctgtggtacgccagggccagatggtctgtctgaccaagaagctgcctgcggtggaagggacgccttgtggaaaggggagaatctgcctgcagggcaaatgtgtggacaaaaccaagaaaaaatattattcagtaagtgattttctcatcagtcaatgcctggaggcccaagaagtgaagtgcattcttgtgatgggtatgggcactgttctcagaaggctttattttctaatttaaaaacttttcattttgaggtttatttagagcttcttcttttacccgcagtagccattctcagtgatccgagatttactggggaaaatgcagatactgggaatttatttgcagtttacatcttttaacaaatacttatgtaactcagattctgtctaattgagacctcaggtaggaccctattaattgcttttgggaagtttactttcaagcttctcttgctaaagttatcagaatataagtatttaaattcagtaaggaggtaatagcagagccgatacatgtggtgcttgtacatatttggtgagctccaaatggtcacttttttccccttgacaataagttaatctaaatttaggagctaaagtaacttacgactgctccggggaaacacgtctgccactatatacacagtccagcttcaggtcagcaactgccctattaattttcgaggcctaagtaaaataagtgctcgctctcaacccacaagatttgcaaagtccctagaagagaattatcctgtgcccattgcctgtatctttccagggcatcacccaaccattcatcatcagataacctgacacagtcagccagaggcaattcacagattccctcagcaaagcagctgatcatattcttcctttcagaatctctaagctccctccaggaatgtttccagagaaacagacttaggttgccataaaagggctcttccttccctaaggggtgtgtctgcatgtatggcgtgagtgcatttcagtatctgtcacatctaattaggaattaagccaagttgggtccggtacatttatgaacgtcatggagtcggtcacagacaggatgtgggatgtcaacaaagggactgcagagttttactgctgaagagatgcaaacacaattaaataatgcccagtgccatgcagatccttcagcattatacgtttcaataaagatccaacatcagagtggacaaaaagttaccatggttcagtgatattaacagagatggaccatattagaagacataatttacaatggtccgtagaaaccaaaaggtgataatctttgtggtgtgctcagtacttaggatgatgctttcagatcttctagtgctggagttgggagggtggaaaagatgaattgcttagcactggaaatgtgttgcatttccaaagcatgatcatgttaaattcagtgaaaatataactgtatctgtgacaaagtttccactttgtcattaaatgcaggtgatttccaaatgcacactttcaatgtttttctctcattggagttaaaatatattctattctctatttcagacgtcaagccatggcaactggggatcttggggatcctggggccagtgttctcgctcatgtggaggaggagtgcagtttgcctatcgtcactgtaataaccctgctcccagaaacaacggacgctactgcacagggaagagggccatctaccgctcctgcagtctcatgccctgcccacccaatggtacgctgctcccaagtgtcagcaaccatcatatgctacatgtcatttgtattctagcaataatgaataagggaagctggggaaataatattaatcttatactgcacagttccaccaatatgcagatcaataacaaacacctatgtgtttgtttttttttgagatggagtctcacactgttgtccaggctggagtgcaatggcacaatcttggctcactgcaatctccacctcctgggttcacatgattctcctgcctcagcttcctgagtagccgggattacaggtgcacaccaccacacttggctattttttctttattttttatttttagtagagacggggtttcactatgttggccagactggtctcacactcctgaccttgtgatccaccctcctcggccccctaaagtgctgggattacaggcatgaggcaccacgcccagccacatatgtgatttttaagttttattataagcaatattcagagaattggaataaataatcaccattttgaactctatgtatagataaaatccatcagcattggtgagtaaagagactgtgggataaaaaaaacacgtttgcatcttccccttaaaattaactatttaaacccacaagaatatatctaagtttcagaactgataaggtaatactgaaacatgtttgttttctaggtaaatcatttcgtcatgaacagtgtgaggccaaaaatggctatcagtctgatgcaaaaggagtcaaaacttttgtggaatgggttcccaaatatgcaggtgtcctgccagcggatgtgtgcaagctgacctgcagagccaagggcactggctactatgtggtattttctccaaaggtaactacacaccaactgtccagaagcagtaggcgtactggtggaaattatttggtagaatgaagcctgcggacgccagacgtaaacagttattagtttggggtcagttagattttggaaggtttttattttcatctctataacttctatattttcaaactttacacaatgaataaaaattattttataaacagaacaagtaaatgttttaaaagctatatttaaaaggtgtaactcactgtaaaaggtgtaactcactgtcaaggaaggcaaagtgtgaccttaactttaaagtaaccatgaaaacaactagtatttcctaagcagcattgtaaaggagaccataaagcaagaaaactttttctatttttctatgatttacttaagaattcctttgatgagccgtggagatgggtttcaagatcatatacctctgactcaggcttttgaataagtcaagaacccttaatatgaatcaatgtccctctagttatatatgttataatccttgtgtatgtgtataatatttgtgtatggaacatgccttatttttcacaagtgagcattttctaaatctatagcagagttttattcttatggtcagtgttatacagcaatttacaaatttgtaaacagttgctacatttaaaatcacctatggctgggcgcagtggctcacacccgtaatcccagcactttgggaagctgaggcgggcagatcacaaggtcaggagatcaagaccatcctgaccaacatggtgaaaccctgtctctactaaaaatacaaaaattagctgggcgtggtggcacacacctgtaatcccagctactcgggaggctgaggcaggagaatcatttgaactcgggaggcagagattgcagtgagccgagatcacgccactgcactccagtctggtgacagagcgagactctgtctcaaaaaaaaaattacctctgaaacttggccttcagatatttataatatgttattgaaaaacaagctaatgtcaatttatgaaattttttaaagctcatgtttttattagaaaataatgcattttcattcaaaaatattacacagaagtaaaaacataaaaatcacctgaaaataccaccatctacagagctattaacctgataaagtatattctacttcaactcacacacacacgcattcacaacatactcatacacatgcataaaaagagttttctatatacataaatataaaatttacaggcttatttatatatatgagtgtatatatattacatatactcacatgcacaagccacaatctatatacacactgttttataactagcttttaaactatacactaatccgtttattcaaaatatattcagtctcttccagtaagtccgttcatctaacttccccagactcctttttctgcactaatttggttgtgtcgatttcagtgtctgacagttcaacacacaatagggaatgctctccaaccatgacacagttttgaatgtcaagtttagattttcaaatttgtcattataataacaactatgcaacaaagaaggatctttgcattctcaagcctgctcatattcagttctgcacacaaatgatagtctgaaacactaagtgaaaagattacttctagtgagaatgtattatgcatacaaaaacgaagatgagtaccttgtgtctcttaacacattcagaggtaaggttaagagagaaaatgtgtaacctaggcttatccaaaatctgctttctggcaatatgacaaggatttttcagttagctacttctggaaactatgtttttttggcttttttttttttcaatggactgtccataccaatcaaactcaaaaaatcacaaatgagaacttactagttgaccaaaggagcaaatactgatgcaaacatttcccactcctaatgcatttgccatgattcaggtgaccgatggcactgaatgtaggctgtacagtaattccgtctgcgtccgggggaagtgtgtgagaactggctgtgacggcatcattggctcaaagctgcagtatgacaagtgcggagtatgtggaggagacaactccagctgtacaaagattgttggaacctttaataagaaaaggtaatatgatagaacctttgtctttatgtgaattgaacaaagctttagactcttgcagaattgataaaggaggattcatattacatcataagctatctgtatgaggaggtctaacgtggctctagaaacacattttaaatatgagaaggaagagacaggagatgaataaaactctggttgctcagggaaaactcatgctgcctctggaagcagataaactgcagtagccatgggaatcaatagcttgtagagtcagaaaactgaaaagaaaaagtgggggacattccactttagtgatatcttgcagatctagtgttattcctaaaacataatttagggaaggttggttggttttgatcttaactatatttttaaaaacaaattatccttacactgtgttttccttaagaaaatatttccccttgcaaaatgtaagttcattgcaatggtgtgggcaacagtgaagtatcctggtttatatctactctctaaagaaatatatacagcagtgtctctctcctgcttcctcttatggtcctagatttttgctttaaatattcaagtttatgaagtaccaatttccggcataaaatatgctatcaggtaggatgactgagttgactagagtctggtaaaatacaggcttgcttttcttcccaaaccactcttaggctgagtgttattagtcaaatgtatctgtattcttgatgtacgtgctgtgttgtctgtaacttgagagtaatatgcaaacgaaattaacaataggatttattaaaataattaaacatgttaatgtaaaaaactataaattttctctgatgtgatttgaaaatatatggctgaaaaatttattctgagttaaaatatgcgttactaattctatttgctaatgaaataattattcacctaattgtgttagaccatctatgtcaaaaaccctgcatgcccaattatatcctgcatttttatatgtttcaaaggtataaaacaccttggagatgatcagtccaaccttctgttttaaaaatgagttggactctgaaaatataggagttagccaattatccatggctgatgaatgccagagaagagcagacaccataactgaaatcctagaatacacaggtcactttgaaaaaaaaaagaagaaagagagatagaagaaagagagaaagaaagaaagagagagagagaaagaaagaaaaagaaagaaagaaagagaaagaaagacaaaggaaagagaaagaaagaggaaggaaggaaggaaggaaagaaaaaggaaaggagggagagagggaattcaggaatcaaattagaaacaaaactacttttaaaaagtaataccttatacactttatggtacatattctcttctatataaagttataaaccagttttaaaattgctaaatttagcattttaagtatttttgtgctgacaactaatatctgcacattttttcacatgaaaaagaagaaattcattatagcaacaagtggtatgcaatgtaaccacctgaaaattggtttgaccaagattctactatggtacaaatgacatgtttgagtagttcaaattaattacctagggaggccatagtaatttatatgatttatgaaaaagaacattgatctcatactgcaatatttgtaatcaagctttggctcaatgattccttagacatgtgatctttgaattgtcacctaatttctttaccaggagatttctcaaaagtaaagtggaaatactggtaattattatcatatggttaataaaactgttgtgaaggtgaaatgaggtaatacatattaaaatatttcatcaattttaagcccattcacaatatgaccctaatcttaactcgctcctccctcagttttcctcatctcagtaaatggcaactcagtctttctactattgaggccaaaactttggaggcatggttcacgtctcattttctctcacaccccacatccatccatcagcagatcctgtcagttctatttccaccacatctccagaatctgggtgcccctcaccaccgtgaccgctcccaccgcaatccaagtgttcatcagatcttgcctggactaacactgcagtcttctcgctgacctctggatcctttgctcctcaatctcatcttaccaagcaagggaagccatggctattacctaaaccagatcattgcattcctttgatcagtagcctccaatggcttccatcttacttagactcaatacccaagactgttttgtaatctctaaggtgctaaaagatctggccccttccctcctctatgtcttttctacactgtccctttctcatgctctgctctgaccagaatgcactttctcgcacttcaaaaacatgacaccaggtatgagaatgctgtttcctctgcctggaacactttctgctattaatgagcagtacactttccagaatctctttaggtctctgtcaaatatcacctccccagatggtggctaccgtaaatgtacaagaggacatctcctccactcccaccactactgtgcaacttcttaccttactccgtttcttcacagctcttatcaattgatatcaccacatattttgtttgctgggagcggactaaaacatcccttccctgagagcatgcttgaatataaatgaatatattttttcatgacagacattgtccttggcactgtgcagatagccctgaacaaaacaagattcctttgccctgccagccatactttgtaagagttgtatgaaaattgcattcacttatggtagtcgggaaagctggttagtgtctggagtttaaatgataccaagcaggatgtaaagaaaaggaatcaggaatatcaagagaatcatctcttactaaggcactaaaaaatcagggcactaatactcaggtttactagtgcttgtgaaactcagtttgaagacctgcagcaatactgaccatcatactaattctcatcaagatgagataagctctaaggaacaagggtaaacacccaaaaaagcttcccttaccctttattctttattttacttactccttactgggcatcatttaaactctgcacataaccagaatttaatttcatttaactgctataacatatggctggcaggggtcaggattttatgcctggggatatagtgaaaaagagcgctaattgggagtcaagagcctggctttttttttttttttttttaagacagggtctcactctgttgcccaggctggaataacaccatcttggctcactgcaacctctgcctcccaggttcaagcgattctcctgcctcagcctccagcatagctgggattagaggcacgggccagcatgcccagctactttttgtatttttagtacagacagggtttccctatgtttgccaggctggtcaggaactcctgtcctcaggtgatccccttgcctcagtctcccaaagtgctgggattacaggtgtgagccacggcatccagccaagcctggcttttaagcctaacactgccactaatcagctctaaagtgaacttgttcaaatactgtcatatatccccatttcatactctttttgtgtaagatgttatatttatctccaactaccttctgtttagacaggatctcattctgttactcgggctggagtgcagtggtgcactcactgcagccaagacctgggctaaagcgatcctcccacttcagccttgccagtagctaggaccataggcatgcgccaccatccctggctaactcttttactttttgtagagacaaggcctcccctgtatttcccaggctgctcttaaactcctgacctcgaggaattctccaacatcccttttgactttctttgaagccactatagtttcatggattatttattaatattaggtactacaaaacacatctgtaacaaaatctgatctgtaatgtattacaaaaataaaaataatgaatcgagttagacagaataaggaacgccctgagcattgcatcatctctcttcaacactgtaggaagctttaccacctgtgtggctgtcactgtagaacagattgccctgcagacaggggacttccttggcgataagcttcctttccaattcagaggaaactctggagtaagggaaacacacttggatttttagcatgtgaatgagaactggaaatgagacagttcagctccacacgtcagtcaaactgctcaagccaatagtattcctgtttaaataactaggaaagtgaagggaccctattatgaaattacttaaaaaggcaaaaatgtggacaaaagttgactcgtcatttcacccttggtgcttaattagcatttccatcctagcattcctcacaggtttatgggtattaaagatatttgtgtctttccccatttttttgtccagatgatggctctttgaagacttatatgtcactcaccataaagcctttctcaatctatcgtatcttatgggcactaagaattcagaaaaattctctaagtcatttaaaaaaattccccttttatgatggtattagtaatatcattacccaatttcagaattgcatgcttcatttatggcctgtcccaccaaatccagaattctagtagaaaggaatgcagagactctactcacctctagtccaaaaactaattaattctgtgttcccaagttagtctgcacattggaacaatgtgagaagtttcaaaagtgctcttgactgtgcccgaccctggaagatggggatttaattggtctgaggtgtgggtaggctctgaaagatttaaaagatccccacgtgattctaatgtggaagcaatctgagaaatattaaagaattatgtgagattaagtgaaggcatatttttgtcagtttgtgtttaaacagatcccattttgtgccagaaagaatggaaagtagatttgtaaagatgataggatctgataaggatgaaaatggttgtataaatcttgaaagttagtataaatgttttaaatgaaggcaggttgctagcatcatcctaattttgaacacctcaattaaagtgtatacaatactgtagtataattgcaattttctcataaaaaataatttttaaacccaattttaaactaatccattaaaactgtgtgttaagagaagactttttagagaacttctgtttgtgtatttatttgttaagtgtttactcatttttttctccctttttttaaccaccttcccccacttcctgtgaacattcctacttccagtaagggttacactgacgtggtgaggattcctgaaggggcaacccacataaaagttcgacagttcaaagccaaagaccagactagattcactgcctatttagccctgaaaaagaaaaacggtgagtaccttatcaatggaaagtacatgatctccacttcagagactatcattgacatcaatggaacagtcatgaactatagcggttggagccacagggatgacttcctgcatggcatgggctactctgccacgaaggaaattctaatagtgcagattcttgcaacagaccccactaaaccattagatgtccgttatagcttttttgttcccaagaagtccactccaaaagtaaactctgtcactagtcatggcagcaataaagtgggatcacacacttcgcagccgcagtgggtcacgggcccatggctcgcctgctctaggacctgtgacacaggttggcacaccagaacggtgcagtgccaggatggaaaccggaagttagcaaaaggatgtcctctctcccaaaggccttctgcgtttaagcaatgcttgttgaagaaatgttagcctgtggttatgatcttatgcacaaagataactggaggattcagcactgatgcagtcgtggtgaacaggaggtctacctaacgcacagaaagtcatgcttcagtgacattgtcaacaggagtccaattatgggcagaatctgctctctgtgaccaaaagaggatgtgcactgcttcacgtgacagtggtgaccttgcaatatagaaaaacttgggagttattgaacatcccctgggcttacaagaaacactgatgaatgtaaaatcaggggacatttgaagatggcagaactgtctcccccttgtcacctacctctgatagaatgtctttaatggtatcataatcattttcacccataatacacagtagcttcttcttactgtttgtaaatacattctcccttggtatgtcactttatatcccctggttctattaaaatatccatatatatttctataaaaaaagtgtttgaccaaagtaggtctgcagctatttcaacttccttccgtttccagaaagagctgtggatattttactggaaattaagaacttgctgctgttttaataagatgtagtatattttctgactacaggagataaaatttcagtcaaaaaaccattttgacagcaagtatcttctgagaaattttgaaaagtaaatagatctcagtgtatctagtcacttaaatacatacacgggttcatttacttaaacctttgactgcctgtatttttttcaggtagctagccaaattaatgcataatttcagatgtagaagtagggtttgcgtgtgtgtgtgtgatcatactcaagagtctaaaaactagtttccttgtgttggaaatttaaaaggaaaaaaatcgtatttcactgtgttttcaatttatattttcacaactactttctctctccagagctttcatctgatatctcacaatgtatgatatacgtacaaaacacacagcaagttttctatcatgtccaacacattcaacactggtatacctcctaccagcaagcctttaaaatgcatttgtgtttgcttatttgttttgttcaagggttcagtaagacctacaatgttttgtatttcttgacttattttattagaaacattaaagatcacttggtagttagccacattgagaagtggttatcattgttaatgtggttaatgccaaaaagtggttaatattaataagactgtttccacaccataggcaataatttcttaatttaaaaaatctaagtatattcctattgtactaaatatttttcccaactggaaagcacttgattgtacccgtaagtgtttgagtgatgacatgtgatgattttcagaaagttgttgtttttgtttccatagcctgtttaagtaggttgtaagtttgaatagttagacatggaaattattttataagcacacacctaaagatatctttttagatgataaaatgtacacccccccatcaccaacctcacaacttagaaaatctaagttgtttgatttctttgggatttcttttgttgtgaaacactgcaaagccaatttttctttataaaaattcatagtaatcctgccaaatgtgcctattgttaaagatttgcatgtgaagatcttagggaaccactgtttgagttctacaagctcatgagagtttatttttattataagatgtttttaatataaaagaattatgtaactgatcactatattacatcatttcagtgggccaggaaaatagatgtcttgctgttttcagtattttcttaagaaattgcttttaaaacaaataattgttttacaaaaccaataattatcctttgaattttcatagactgactttgcttttgacgtagaaattttttttctcaataaattatcactttgagaaatgaggcctgtacaaggctgataacctatatgtgatggagatcacccaatgccaagggcagaaagcaaacctagttaaataggtgagaaaaaaaataataatcccagtgccatttgtctgtgcaaagagaattaggagagaggttaatgttacttttttccattttggaaataattttaatcaagtaactcaaatgtgacaaaatttatttttattttttgtggttatattcccaacaacattaaaaaatactcgaggcataaatgtagttgtctcctactctgcttctcttactatactcatacatttttaatatggtttatcaatgattcatgtttccctcaaatagtgatggtttacacctgtcatggaaacaatcctagagagctcagagcaattaaaccactattccatgcttttaagtagttttctccacctttttcttatgagtctcactagattgactgaggaatgtatgtctaaattcctggagaagatgatatggattggaaactgaaattcagagaaatggagtgttcaatagataccacgaattgtgaacaaagggaaaattctatacaactcaatctaagtcagtccactttgacttcgtactgtctttcacctttccattgttgcatcttgaattttttaaaatgtctagaattcaggatgctaggggctacttctttaaaaaaaaaaaaaaaaaagaattcgtctgaaaatgctcaggtttgtaagaatctaatctcacttacataactaagcactccataataagttttattaagtacaaagggagccagaaaaaatgacatttatttcttctagatcagaaaaatttaaattaagccctgccttgctgtttagaaatatgtgggcattgttataatttattcaataaatttatgttcctttgccttcctgtggaaacagttttatcccactaaactaggaattaggggataaatcacaaacaaaaaaaaagttgcagcactgaaaaaaagtaatttattgtttttgcaactggtatgtgaatttgtgtgataaaattatttattcttatttaacaaaaatatgttcaaatttttctatatttaaaatgttttgctgttgtcctactttttaatttatgcttcatgtttgtgtataaagtacacttttacactttgtgagtttacataatatacagcactggttgcttttgtatttttttacagaaagctttctgtgtgaagcaggtgtatatgtatatattcctcatgtattcttattctgatactatcatttttctttccaaggaaattttaatctgtcatgaccaatagtgttcattacttgtgcctatgataataggttttttacatcacattaacactattttttccaagtcacaaataagaaaaacacttattcaatgaaacaaggtgcaagttttaaatttgggtacacaaatagcctagaagcttcctacagacgctaagacacagccaataatcagatcctttcacttcatcgagaaacttggacaagtcgatattgatgtattagatgaaagttgtctacacacaacttctgagggatacaaacgataataaaaccaaatgttgtctgtttctcctttagaaacacctcctaaaattaatatcatttagtctctagtgtctgtaggattctacagatgagcacaaatagattgggtttgtataacaaatgctaatagtcataactgtttctacaaatatggggtgtccattaagagaatgtgatgttttcctactgctgttgaatcccatggggtgattataggacttgaaataggcagagtcacctctgatgacatcagcttgcctctgtgatttcacagtctgatcctggcaacaagacaaagcacccttggacacacagccaatctctggttgtgatatttccccattgattccttccttgttaacaaggtcattttaatggttcaggtgaggacagcagccagattcaaagtccagaatttgtgctgttacatagagttcacactgtcaaataacattgaatttaataatgatcaaatttttctagtagtctttggcagagtgtataatctcattggcatgattggtgaatattactaatctctttataatgaaagatgctttacaaataccttatatttgctaacatttcaaaactactaaataaatgaaatagccatgtgtacagaaatggtcatttaaagctttaatagaaccaaattcaagacaatgtatcatttagacacacagaaaaggaacttgtatgttttccctattatttttctcatttgccaacaatctatagttttaggttatcaaacagatagatcaacttaactggctagtacattgaaaaatcttcctaagaatcctttgttagcataatctatagagataatttctcaaattatatcatcatgatgcatataaactctataatgtataattgtgtttcatttatttaatgtatgagaacatattgaaatacaaaaccatgcattagccaaaaaattggaatacaggtagtgttcagatcagcaaaacattcagtctggtaaatgcctgcctggggctatgatatcattctcaatgcaggttttatggaaaaactaaaagaatatgttgttagatgatgttggttttgaaaaaaaaaagacattaacatacacattagttagcccagttaattgcattctactaatatagttgcacattagcaataattttgctgtctctggtctttattttgtggcttcaactaactggaccatgtggactgtaaaggtcaaatggaaaaaacgagcagtggcccctcatcctgtaaggtactgctacatcagagtgacctaaaagtctaacactgtgaggaaaactgtgatttgtaggaaaaaaaaaaaaaacaaataaaaaacagggcatgctttttaatttttttccactttcctttggcacacccaatgaacaattctaatttttattgaggtgctaacatctttcgtgaccgactgtcaaatgtggtatttttgagttactatttttctacatgattttacagtttgcaagaaagacctctaagctttgtgtcacggtagggcacaacttgatactcaaaatttgaaaaataagcacatccaatgattgttttgaccaacagtggtcagtgacgtaaactgcatgtgcatctgaggacatttaaggggtcattaaaatttgaggagcatcaggccggagtagcagacttttagatgagtcatatttcagcattcactaagtcctcagcattccattcaaactgtcgtgtatatttggcctgattttttttcaagctttgcaataatttatgttattggtaaacacttggtgactatatctcagccttttctttaacaactcacaatatattagaaacacgtctacctatactgagagtatatttacaatagaagaacatactgtatgtgactttgtaaagctagacttttgattaagaaatatataatctctggatgctatttttgcattatacactcaggcacaacgtaaaccttgatggctcatcttgctacaattacgagttgaaaaacactacttacgtatttgtatgacctattagtcagaggaaatcatacatatgctttgtaaatagactttgcagataactaaatagactgaagaaatatgttgcatttgatagaagcaattgcataaatatttggtttctatattagagtctgtgagtaaagtcaagtaataaacctaagtaggtataacagatttttaaaccttgaaacttgctttgatggtagagaaaatcattgaagatttacatactgtatataagatgtaaaatgtacgctgcttattaccctcaattttccagaagcaatggtatataatgcagttgaaaaaccaaaaatcttggaaaactaagacgggtcttgtttaaaatgtctctcagctttggcaaccttcaaatcttaatcaactatttaaagcattactgtgtcttgtagcctgcattccacaacagctctgttattcaggtaaaagacttgaactgagccgtttgggacctatactgtaatattttcattgaggaacaatatcctattttgtaaagcatttccctatgtgtgactttaaactgtaaaattaaacactgcttttgtgggttcagtgggcataataaatataaattgtaaacta

SEQ ID NO: 109 - DNA, 4023 bp, Homo sapiens
agccgagaggtgtcacccccagcgggcgcgggccggagcacgggcacccagcatgggggtactgctcacacagaggacgctgctcagtaagtacttccttcctccccgccagaacccgcctgctgggtctgcccacgggtgccggtggggagcagaggcaccctctgccctccgggaactggggaggccaggcgccaggcagaaggatgctgagaaggggagagagccaggaggtcaggcagagagagtggtccactgagaacctggcatctccacaggtagagaaggggcatccctggaaggcttccagggggaggtgatgtcaagatgtagaggcaactctgggaaccagggggtgagagaataggatgggcaaagaggctgggcaggagagggaggctcagaagctgggcagggaagtggtgtgaggtgtggaggggttgtggggcctccagcttgcccgggatgaatagaaagtcagccaggcctgggggccccagggcccacacaatcacacagcatgcacagccacacccacatggccacatgcgcacacagccatatgacgtcatctacagccctggatctcaccagcccaggaacccccacatgcagaccagagtccccatggtgaacggaacaggtctccctcacgccgcacacagacccagatgcacagccacacagaaaccccagtcccacgtgcgctgccacaggcacaggcccctgccagagcccggcagcagatacctggggaggcggcgagggtgccgtggggtcgctaagcctgggtgcctggccccttggccctccccaacagccagtcttccccaaagggccggatggttcttaggacgggaacgatggtgtcactgccttccgggccattgcgccataggccccttccgaccacgtggctgccggtgccccgttgggggtggtggtgagcggtaactgtacccgcccccaacaccttctgacaggctcacagcatccctggtgggcctgacagaaggagccacttatggagagaggagggaggcaagagaggtcaggggagagccctggccttgtgtgacctgagtaggaccttctcctgagacttggtttacctgtcaggaaagtggggacatggactggaaggtcttccacatctgttccaggctgcacctctggttgaaaaggcagcctctcctggttctagacagagctgaggacacaagctgctcccgggctgcctgccctgaagccctctcaggcccatctacctggatggccagagcagctgacaaggcaggtcctagggcagtggccggtctttagcccagtggtcttgcagggagccagtcccaccttgcagagagtcagctcccgaggttagaaccgtgctgtaggcaggactgggatccggccaggcactgcagcctttgctcaaagacctacttggtaaatcgcagccactgtctcagtccctcccactgcttgctgtgtcaggccctgggcagtgacttactggggagatgatggtggccttggtgggcacacctgggcacacaccgtgccacacagtgcccagcccccgccctccactacacaaagtctgggatgaaggaggcacctttcaaggccctcttgaaccccctccccgaggctcccatctgtggctttcctcaccaagtcaggtgacacccctcttctctgccttaggtctggtccttgcactcctgtttccaagcatggcgagcatggcggctataggcagctgctcgaaagagtaccgcgtgctccttggccagctccagaagcagacagatctcatgcaggacaccagcagactcctggacccctatgtaagcacctgggcccttgtggcatctgagtctcagagaactatggggttaggaagggagtgagaagcagggaggacaggcctagccccactccatatggccaggtcggggaactgagtcgctatgttattccagccttaaccctgaggagctaaggctggccctccagctttcctagctctgtggtcccggggcgggactccggacaccatcaccatgctcacctgcttactcagtgtgtttcctgcacacctgccaggctctggtctaggcactgggacgtagcagtgagcaagacagagtccagccctcttgaagctcttcattccccacgggcatcccaccagccccccaacatcactccgaccttgcctgcagtgatcttggggtcctcttccctctcgggcctcagtttccggatctgtccagtgggagattggattggggtgcatgaggtctagcatttcaaggcttacttgtctgtgagtgtggtccggatcctcagcattcaccctgtgatcctcctgttcccgccagatacgtatccaaggcctggatgttcctaaactgagagagcactgcagggagcgccccggggccttccccagtgaggagaccctgagggggctgggcaggcggggcttcctgcagaccctcaatgccacactgggctgcgtcctgcacagactggccgacttagagcagcgcctccccaaggcccaggatttggagaggtctgggctgaacatcgaggacttggagaagctgcagatggcgaggccgaacatcctcgggctcaggaacaacatctactgcatggcccagctgctggacaactcagacacggctgagcccacgaaggctggccggggggcctctcagccgcccacccccacccctgcctcggatgcttttcagcgcaagctggagggctgcaggttcctgcatggctaccatcgcttcatgcactcagtggggcgggtcttcagcaagtggggggagagcccgaaccggagccggagacacagcccccaccaggccctgaggaagggggtgcgcaggaccagaccctccaggaaaggcaagagactcatgaccaggggacagctgccccggtagcctcgagagcaccccttgccggtgaaggatgcggcaggtgctctgtggatgagaggaaccatcgcaggatgacagctcccgggtccccaaacctgttcccctctgctactagccactgagaagtgcactttaagaggtgggagctgggcagacccctctacctcctccaggctgggagacagagtcaggctgttgcgctcccacctcagccccaagttccccaggcccagtggggtggccgggcgggccacgcgggaccgactttccattgattcaggggtctgatgacacaggctgactcatggccgggctgactgcccccctgccttgctccccgaggcctgccggtccttccctctcatgacttgcagggccgttgcccccagacttcctcctttccgtgtttctgaaggggaggtcacagcctgagctggcctcctatgcctcatcatgtcccaaaccagacacctggatgtctgggtgacctcactttaggcagctgtaacagcggcagggtgtcccaggagccctgatccgggggtccagggaatggagctcaggtcccaggccagccccgaagtcgccacgtggcctggggcaggtcactttacctctgtggacctgttttctctttgtgaagctagggagttagaggctgtacaaggcccccactgcctgtcggttgcttggattccctgacgtaaggtggatattaaaaatctgtaaatcaggacaggtggtgcaaatggcgctgggaggtgtacacggaggtctctgtaaaagcagacccacctcccagcgccgggaagcccgtcttgggtcctcgctgctggctgctccccctggtggtggatcctggaattttctcacgcaggagccattgctctcctagagggggtctcagaaactgcgaggccagttccttggagggacatgactaatttatcgatttttatcaatttttatcagttttatatttataagccttatttatgatgtatatttaatgttaatattgtgcaaacttatatttaaaacttgcctggtttctaaa

SEQ ID NO: 110 - DNA, 153013 bp, Homo sapiens
aactttggctcagcctgtcttcatccactgtatcctgacacctctcctactccttctctttaatgtacagctgagactgggatacccttagactgaaaggaaggacacggctatgtagaaaagaattgactgaaggggaggagtactcgtgaaccccttgcttcagcctcccaatgttctgagagaggaggagccaggtaactgctgctaactgccatttccccaccatctgggcctaaggaagcagaagtaaggcttaattaatagccagtattgcttggagattcactttacttatttaaaccaacaaaaagacttaagatttagcctgttggaatatggttctaagaggcttatatttccaagaaactagtccttagtttcttttgttctttgctactttgtgatccctgctagagacaggccacttgctttgggttaccataattttctttttcttttttttttttgttttttgttttttgagacagagttttgctcttgttgcctaggctggagtgcaatggcgtgatctcggctcaccgaaacctccgcctcccgggttcaagcgattctcctgcctcagcctcccatgtagctgggaattacaggtgcccaccaccatgcctggctaatttttgtatttttagtagagacggggtttctccatgttggtcaggcttgtctcgaactctgccctcaggtgatctgcccacctcggcctcccaaagtgctgggattacaggtgtgagccactgtgcctggcctgggttaccataattttctaagcacacttcctagtgacacctggcccagtttgacacctgtgtagaagcaataatcaatgaaagcatcttcagatattctaggcccatactcagagccagctggactttgatttggtattggtcccaacctctggggtgacatatgctgttcttcattgattttgtttttgtatgttttgagacagactctccccctgttgcccaggctggagggcggtggcgcaatctctgctcattgcaacctccgccgcctgggttcaagcgattcttgtgcctcagcctcctgagtagctgggtttacagtcatgtgccaccaagcccagctaatttttgtatttttagtagagacagggtttctccatgttgggcaggttggactcaaactcctggcctcaagtaatccgcccaccttgagctcccaaaatgccgggattacaggcgtgacccaccgtgcccagaatgtttttgaattatagaaaaccccttgggtttggtgggagggagtgagggtttcatccatgacacagtgacacttaaaaaatcagtttattcaaatgcactaaaggaattgcttgataaattaaggacagtaatacctctggccttagatagaaatgattagaaggtccttcttagatagaaatgattagaagtccagaggaatctgggaaggaatttctaaattttctctttccattgacataaggtaccagggtatgaaattcatttgtccttgtatatatgcatttatttaacagatattgggtatctaatacatattagagaatcatcccttagattatcttgatagagaaaagaaaagttctggagaaatggtggagagtcattcccaggaatatagctttgtaagaaaattttcctggatcaattggtaaagttttctggaaccactaggtggtgatattacattatgaaaatgacatgctttccttgacacctttcaaataactgcaggcctctggtaatttctgaggccagtgtccccacaaccaaagaaacgtcttaatgagtaaatgaagaaaaacacattccatcatttacatatataaatttacatatgtaaatttaaatgctccaggggactggtagttcctcgagagaagggtctgtgcctattgttttcatggttacaacctcaggtggcgtgtaggaagcccttgatcaatgcttgatgaatgaatccaactctgaacaattttgatgaccattgaaaggaccattccaagagtgtggcaaaaaaggtggcacatgtccaaaaggcctaggattttgggaattaggagctgttgatgatcctgacagattatcagttgggcagagactcaggaaggcagtatttggaagggcagaaatatcaaaagtgatctgaggcacttataattctttgtatcccctaagcttaccttggccagatttcatcctttaaaaaatacagggaggggccggatgcggtggctcacgcctgtaatcccagcactttggaaagccgaggtgggtggatcacgaggtcaggagatcgagaccatcctggctaacacagtgaaaccctgtctctactaaaaatacagaaaaattagctgggtgtggtggcacgtgcctgtagtcccagctacttgggaggctgaggcagaagaattgattgaacccgggaggtagaggttgcagtgagccaagattgcaccactgcactccagcctgggcaacagagcaagactctgtctcaaagaaaaaaaaaaaaaaagaaaaatacagggagggtgtaaaccaataaattctgatgtatgtatatgtatatatatatatatatatatatatatatataggcaagggttgaagataaataaggtagaaatgtctactttatatttttggccttaactatgccagtgtaattagaattccctatatttaaaatggttccttttacttattgaatatatatgtataaaattttttgggggtctatattacttcttgggatggctttgccttagaaggaatcttcaaaaatcatttttaaaaaactcttctctgcctctcattcattgttttatttgctcattcatttatttgctataaattcattcattcctcaaatatttattgagcacctattatgtacaaagcagtggtcaagtttgtgtgatcatctttgaccttttctttttatggtccatctgaattcggttaattagcaagtcatattaggtgcagcatccaaatctatccacttctctctgctttttctgctattaccctagtccaggtctctgtcttcttgcatctggattattgcattacccctagtctttttttttttttttttttgagacagggtcccgctctgttgcccaggctgccaggttggagtgcagtggcaccatcacagatcactgcagcctcgacctcctgggttcaagctattcccccatctcagcctcatgagtagctgggattacatgtgtgtgccaccatgcccagctattttttatattttttgtagacatggggttttgtcatgttgcccaggctgatctcaaactcctgggctcaagccatcctcctgcctcaaccttccaaagtactgtgattatagggatgagccaccatgccaagcctaacccctgatctttaccccgaccatccattcttccatctttccaccatgtgaatatcatgatacatctttccttaaaactctcctttccccttaggatcaagcctaacctctttcacttggtttacaagcctcacaaggcagggctatgacctggcttctctccccccagccccattgccactcactctcaccttgttctatgtgctctagccaagacttttttctttaggttcttctaatgaaccatgtcctctcttaccttctgactttttttttggtactttttcttcgacttcttcttcccccttctgcctggctattttctactcattctttaggtctcagcttacatatgacttatttgggaataagctttttctgaccactgtcaagatgaagttctcctctttcactttttctctcatagccactattggggttcacagcttgtctgttgccaccctctactgccagactgacttctgcgagtggcagagctctctctgtcttcactatataaatatccggcacctcactgagtgcctggcccactgtaagtgcttaataatatatgttgaatgagtgaataaatgaaaaaatatatatgatgtgtcttctttcttcagtgtacttataatccagcagtgtgaggtaagtggtacaaagaaagaactacagtgatgagaagaaggagaggtcactttggatattaccatttaaggctgggttgggttttggcaagtgaagatgtttgtggaggtggcgtttgaagtggagggaagtgacataggtgggaaaagtttggggagcaggcaaggagcatagtgttcctatctcagaagagtaggagtgggactgaagacagcttgtgactagattgtgcagggcctcgactctgatagccaatgggaagacattgatggcttctgaatcagggagtgatagcactaaatcaatgccttagaaaatgctaatctaatggcagagtgaaacatgaattggagagagaacagcaagaccagttaggaggctatcatagaaatcaagatgggaggtgatcagggcctgaattatgtagatgtcaataagaatggagacaaaaggatactatgcaaaggaagaatgaaccagaacccggaaaccagaaaggaagagtgagggaaagggaggagtgaggtgctttattatcggaaatgtgaagtcaagaggaagaaccaatttaaggaaagatagagatcattaatcaaacctttacaatgaaattgtggttatatatacattttacttatgagaattccgtcaatgtgtggggttaaaatgaaagcccaagtgggagggagtgacaaagaagatgcactgcaactaatgggagctgttccagttcttccactctgaaaatacgtcccagagggagtgtgagatggggaaggtcaagttgctgttcctcattttatgtcaaccatgtgtattttatggttgacatagggattatttaaggataactgtggttattcatgatttatgtcttatacactgattttagaaccaaattcccaagccagattttgctttttatttatttatttttaattttattttttgagacagagtctcactctgttgcccaggctggagtgcagtggctcagtcttggctcactgcaacctctgcctcccaggttcaagtgattctcctgcctcagcctcctgagtagctgggactacaggtgcccgcccccactcttggctaatttttttgtatttttagtagagatggggtttcaccatgttggccaggctggtcttgaactcctgacctcaggtgatctgcccacctcggcctcccaaagtgctgggattataggcatgagccaccatgcctggccagattttgctttttatttttattttatttatttttacttttttgagacagagtctcgctctgttgcccaggctggagtgcagtgccgtgatctcggctcactgcaacctcgcctcccgggttcaagtgattttcctgcctcagcctcctgagtatttgggactacaggcacatgccaccatgccagctaaatttttttttgtatttttagtagagacggggtttcaccgtattagccagaatggtctcgatctcctgacctcgtgatccacccgccttggcctcccaaagtgctgggattacaggcatgagccaccgtgcctggccagattttgctttttaaagcatgtgccaggccccaggcttggcagtaggcagatactaagaaaacacgtcagtcactgcattggagctgctcacagtctagttgggtagaaagatatggaagcagacagtgagcactacagtctaggtgagcagtcagagagaagggtggaggcagagggaaaggagactggtggctggtgtgtcaaggcagaggtggtgctgggccctgggaatggagagagatctaggagtcgttagaacaggtgagcgcagcaataggcgtgcatgagctctcagagggaaagaatattgaggagggaagaggactaaaggccacagccaggaacacacaagaaggtaagcagagtcagaaaacagaagagttgtcagagaagcagcaggaaaactcaggcaagggggatgaggactgtgaataggcaagtggtctgcataatgaggaagacaatggtgactgcggagtgaatgaagtttcagcagtgtggtgagggcaaaataaggggtccccaggccgggcacagtggctcatgcctgtaatcccagcactttgggaggctgaggcgggcggatcacgaggtcaggagttcaagaccagcctggccaatatggtgaaaccccatctctactaaaaatacaaaaattagcctggcgtggtggcgtgtgcctgtaatcccagctactcaggaggctgaggcagaagaattgcttgaacctgggaggcggagcttgcagtgagccgagatcacaccactgcacctccagcctgggcaacagtgcaagactccgtctcaaaaaaaaagaaaaaaaaaaaaaaggtgggggcaggccttcagtgattggaaagaatctggaagcaaaggcaatacatgccacttctctaagttccagctccagaacaactaacttagatatgtcctctagtttccaatcagatttccctggagaaggtttgggatccctggatgccatgacctttgcccctgtttctttacagtatggtctgctatgtccactggaagggcacttcaccatcacagtacatggatccagaaacagactttactctacataagccttatattcaaacctgagtgcaatccagctgatctcaactgtggttgttgcattttagactacacatatctatattattttcttccataagtagcatccatattcccacatgattgcaattgctaacttgctaatagcttcccttgagtttgcttcttgcaattatctaatcagaaggcaacatatgcaatttattacaggatgcagggagctctgggtgttttttttttttaagtcaatggttcctatcctagttatactgttcttttaaacagatttaaataataagaaaagctatttcatatatacccatgtggttagcatttccagtgttctctttattcctttgtgtagatccagacttccatatggtaccattttcccacaacttgaaagactaacatttcttgtagcgcatgtttgcagatgatgaattcagtcagcttttgtaagtctgaaaaaaatctttattttaccttcatttttggaagatattttttgctgggtaaagaattctgtttttctttttcttctttttgttttatttttcttaagagtcagggggtcactctgttgcccaggctggagtccaatagtgtgatcatagctcactgcagcctcaaattcctgggctcaagcaatcctcccacctcagcctcccgagtagctaggactacaggcatgcaccaccatatctggttactttttaaattttttttgtggagatgggtcttgctattatttatatacacaggctggcctcaagccatcctcaaaccatcccttcacctcggcctcccaacatgctgggattacaggcatgaaccactgcactcagcctgttttttttctttcaatacattaaagatattgcttccctgtcttctgtcacatagtttctgatgagacgtctgatgtcattcttatttttgctcctgtgtatgtaatgtgtagttttttttttttttctggctgcttttaagattttatcttttcactagttttaagcaatttgatcatgatgtacttttaggtttcttcacgtttcttctgctcagagttcattgaccttcttggatttgtggggtttacagttttcatcaaacttggaaaaagcccaaccactatttctttaaatatattttctgtcccctactttcttctgggattccagttattatacatatctattccagttaataatatgtgtctattaggctgcttgaagttgttccatagctcactgatgatccatttattcatttattttggtcttctttgtgtttaattttgggtggtttctactgctgtgtcttcgagttcaccgatctttttttgtgcaatgtctaacccattgttaatcccaccttttgtgttttttatctcaggcattatatttttcacctctagttgttcaattgggtctttttatatatataaatatatattatatatttatatataatatataaataaaatatatttatatatgatatataaataaaatatatttatacataatatataatatataaatataaatatatattatattttatatataatatataatatatataatatataatatataagtatacattatatatatttatataatatagaaatatattttatataaatttacatactcattatatgattatataatatactcatatgattatataatatactcatatgattatataatatactcattatatgattacataatatactcattatatgattacataatatactcattatatgattacataatatactcattatatgattacataatatactcattatatgattacataatatactcattatatgattacataatatactcattatatgattacataatatactcattatatgattatataatatactcattatatgattatataatatactcattatatgattatataatatactcattatatgattatataatatactcattatatgattatataatatactcattatatgattatataatatactcattatatgattatataatatactcattatatgattatataatatactcattatatgattatataatatactcattatatgattatataatatactcattatatgattatataatatactcattatatgattatataatatactcattatatgattatataatatactcattatatgattatataatatactcattatatgattatataatatactcattatatgattatataatatactcattatatgattatataatatactcattatatgattatataatatactcattatatgattatataatataataaatatatatatcttccatgtctttacttcacatactctttttttatttttatttttaaacagggtcttgctctgtcacccaggctgtgatcatagctcactgcaacctcgaactcctgagttcaagccatcctctcatgtagctaggaccacagtcatgtgccaccatgcccagctaattttaaaagtttttgtaaagatggggtctaagttgctcaggctagtctcagactcctggcctcaagccatcctcctgcctcagctgctcaatgtgctaggattacaggtgtgagccaccatacctggcgtacttaacatgtcatttctcggttggtttctattgattttctccttattatggttcatatttttttctgcttctttgccatacctgttcactttttattagataccagatttaacaaattttgcctttttgggttctagatatttttatattcttacaagtattctttagcttgttctgggatgcagttaagttacttagaaacagtttgatcctagctgggtgcggtgcatgcctgtaatcccagcactttgggaggctgaggtgggtggatcacttgaggtcaggagtttgagaccagcctggccaacatggtgaaaccctgtctctactaaaaatacaaaacttagccaggtggggtggtgcacacctgtagtcccagctacttagcaggctgaggcataagaatcacttgaacctgggaggtggaggttgcagtgagctgagatcttgctactgcactccatcctgggcgacagagcgagacagtatcaaaaaaacaaaacaaaacaaaacaaaacaaaaaccaaaatcaaaaacagtttgatccttttgggtcttgcttttaaacttttttttttttttttttttttagatggacaagtacagcatttaatctagggttgattattccccacaactgagggaagacccttctgagtattctatctaatacctcctaaggaattagaaggtctttccactctggttgatgagcttaagaactattcctggccctgtgtgagctttaaagattgttccctgtaattctttggtggttctttccccagccttgggatactttcctcaaacccatgagctcattagcacttagctgaagttgtgagtggggactctctggagacctctggggccctctctttgtgtgactgtctcctctctggtactctgccttggaactctagctgccttggcctcccgaacttctcagttcagggatttggagttggcctgagttccctctcccttttggaaagtctctcccgggaataagctgggctgatcacagggcacagcttgtctcttttctgtttctcagggatcactgtccttcgttgcctgatgtacaatatcttaaaaaccattgtttcatatattttgtccagtcttttagttgtttcaggtgaagggaaaatccagttcctgttattccatcttggctggaaacagaagtctatattgttttttaattttgaaaaactgagggcctctggaatgtaggattatgccaggccaagttgctcattatcaggccaggaaaagcagctcttgaagaggctgaaagggcttccagcctaactgcgagggtgctgagtcattctagcagagaccaggcactctgcttttctggctcttatcaagtctttagcttttatctttggactcaacttactagttcacattcctttggtggtgaaggtttggtctcttccactttgaagcagtatctctccgcttacacttgaaatcttgaatcttttacttggttctctttagtccctgtttgtgtatttaggtcactagaggcttctacatctggggcacattaaagttcctcagtggtatttacagcaaccagcatctgtttctgtagagaacaattaacccaaagataccaccttgttctaccttgaagatgaattacagagacacttttaaaaggcaaatccttcatttcaagggtgaataaaataccacttaacaaagcattccagctggttaaatttaggacatgaaaaaaacctgacccaagaatatcgtctggctttgagtccagggtgtttttccttttagagtaaatttggtaccttttcattcatgtgaagttgttgccccccagcattttattctgggatgaaaggtcaacagggactgtcttgttgctaaatctaatggacacttctcagttattaaacctactggacctcttaacaatatttgacactgttgactattatttccttcttaatacatcccctgacttttccttcccctttcaggcctttcttcctctgcctgttttttcagttggtactactcttggttctgtcctgagctttctcacattaaacattccctgtgggctgtcttatgcatgctcatggcctcacagggaattcctaaatctatatttctagcctaagtattttttgctgagcttcagaccattatgttcaactgttcacttgacatcttcacttggatggcacatgggtcacccaaccttagcaggctcacagttgaactcatccattctcccctcagttcagccctgcctctcatgttcttcatttctgcaaagggcacttctaaacaatttctcaagccagaattccttgcattccatcttctactcaatcaccatggcctgttgattctatctctttccatccctattgccacttccctagtttggtcattgtcatcttttacctggatgaccagaaaagacttctaagagcaatttttgcttccgaccctcatgtcatgcaaacgcctccacccctaaccaatttgtttttttttttttcgtattctagccagagcaatctttctaaaatgtgaattaaaggctgttgggatcttgcttaaaatatttgacaactgctctatgctcttaaaataaagcccaatctccttataataaaatatgcagccctatatgatttatttattttttttttgagacagagtttcgcttttgtcttccagactggagtacaatgcgatgatctcagctcactgcaacctctgcctccgggttcaagccattctcctgcctcagcctcccgagtagctgggattacaggcatgcgccaccacactggctaattttgtattttagtagagatgggtttcaccatgttggccaggctggtctcaaactcctgaactcaggtgatccacctacctcagcctcccaaagtgctgggattacaggcgtgagtcaccgcgcctggccgaggccctgtatgatttggcccctgtttactttcttgcatattactgattccctcacgttctaagttccctgccacatttcccattgttcagttcctcaaacgtacaacgccccctctcactttctggcctttacatgttttgttctttctgcctgtaacccttccttcctctcctatacttggctaaatcatactgcaggtgattttctttgggcagtcttccttgaccccctttatcatcttggtttgcctagctccccagattaagtgaaatgttattctatgcttccagaggttgctgtgtttcctctattgtaatgcttacccaatctcccacttgactataaactccatctttttcactgctatatgtatccccagtgcccagttataaggctcagctccataggtgcttagcaaacacttgttgaattgaactttaatgtgtcagtagccacagaagtctcagtcctgctagaccgtagccttgccactttgagcaagaggactgctgggagagatggtattctataatggttctcttgctgggagctggatttttatttccccactgtttatttactagtttagcaacctgattcagttaacaactctgcatcttagttgcttcatatataaatacaaatgcttgaactttctgaaagcaaatggtgggccagatttttttttctttttcatttccttggttactagaaaacccaggtagcttttgaggcaatttctataagaccttcaagaaacagatgatgccaatgcaattttggctatttcagaacccaggaaaaaaatgaagatttgtcagtgctaggtaggaagctagacagagacaaaaaccaaataaggttagaaacaggaaactatagacaaaaggtcaaaggtaaaaatctcttcatagaccaatttgactgatgcctatagatgtaaaaatactaataaaatattagcaaatcaaatcccacagtgtatgcatgatcgagtcagtagagacggggtttcaccatgttgctcaggctggtctcaaactcctgacctcaagcgatccgcctgccttggcctcccaaagtcctgggattacaggcgtgagccactgtgcctggccaaattcatttttttagttaaaaacattttacatttttctggccatagaaaagtctttaactttaaaaattttcacccaaccatttgaaaatgtaaaatgcatccttagctcacctgttgtacaaaaacaggcagccagccagatttggttggtaggccatagtttgccaacccctgcactaatatgttcactaaatttgaaccatttttgcatctctaggataaataccaacttgatcatgaatatactgttggatttgatttgcttgtattttattagtatttttacatttatattcataagtcagattgggctatgtagaaatttcaaactagctgtggggtatagatgtattctatttagccttcataacattttaaaacattttgaatgagttattaatattaacaaattgggaaatattacatggattatttaagattgctggcttttctttaaaaaaaagtgacaaaactgggagaatgttggcctagtttcgccacattttaatagatctgctctattgtatattttctttcttttttctttttttgagacagagtcttgctctgttgtccaggctggagcacagtggcattatcttggcccactgcaacctctgcctcccgggttcaagtgattctcatgcctcagtctcccgagtagctaggactacaggcgcatgccaccacacctgactatcttttgtatttttagcaaacatgggtttcaccatattgatcaggctggtcttgaactcctgacctcaggtgatccatccatcttggtctcccaaagtgttgggatgacaggcatgagccactgcatccagcctctattgtatattttctatttaattaacttctattcttacttttatcttttacctttggtctatagttttctgtttctaaccttacttggtttttgtctttgtctagctttctacctagcgctgacacatctttgttttttcctatgttctgaaatagttaaaactacattagcatcatctgtttcttgaagatcttatagaattagcctcttaaaactatctggattttctataattttgtcgaatagagttttggtttccttttctattttatctatagttagtgatctattaaaaatttcaaactttttatcaattttactaattaatactttctagaaaatcatccagttcctttcagattttcaaatttatacaataaggttgcagtggttttctcttataatttaaaatattagccagcacggtggttcacgcctataatcccagcgctgtgggaggccaaggtgtacggttcacttgaggtcaggagttcgaaaccatcctggccaacatggtgaaaacctgtctctactaaaaatacaaaaattagctaggtgtggtggcgcgtgcctgtagtctcagctacttgggaggctgaggtatgagaatcgcttgaacctgggagtgagctgagattgtgccattgcactgcagcctgggtgacagagcgagattctgtttcaaaaaaaataaaaaaaaagaggccgggctcagtggctcacacctgtagtcccagcactttgggaggctgaggtgggcagatcacctgaggtcaggagtttgagaccagcctggctaacatggtgaaaccacctttctactaaaaatacaaaaaattagccgggcatggtagtgtacacctgtaatctcagctactcggaaggctgaggcaggagaattgcttgaaccttgggaggcggaggttgcagtgagcagagatcgcaccactgcactccagcctgggcaacaagagagaaactctctcaaaaaaaaaaaaaaaaatcacctgtatatcttggctttctcttccctaaacttgcttatttctggttttctgtatacattttgccagaggtctattttactgaacttttcagagacaaggctttggtcttattgttgaagtttatttttttgaggataaatttcacctttaaccttatttccttttaaaattttctcctggccaggcgcagtggctcatgcctgtaatcccagcactttgggaggttgagatgggcagatcgcaaggtcaggagatcgagaccatcctggctaacaggtaaaaccccgtctctactaaaaatacaaaaaattagccgggcgtgttggcgggtgcctgtagtcccagctactcggggggtgctgaggcaggagaatggcgtgaacccaggaggtggagctttcagtgagccgagattgcgccactgcactccagcctgagtgacagagtgagactccgtctccaaaaaaaaaaaaatttttttttcttctgaattagcttattcctcttctaactttttgaaatgaatttttagttaaaacactttaaatctttgttattttctaaataaattatccccttgaactttctactctaattccatcgatctgtcttttctttttagttttatattatttaacaccatttaacatctggtagtacaagttccctttgttattatttttctaagttttcttggttattattgggctagatgatatcttaaagtcactaagattctttgagagttattgtgaaaatgcacccaaataaatccatttagtcccttcttttcaaactcaagtattccttattattccagatatagtcagtctttaaaaaaatgcctaaaatcattgctcgatactttattaagtgcttcaaatcaatctgtatatatgcatatggtatatatgtagtgtatgtgttttgtgtgcatgtgtcagtgtgatgtgtgcttatatatatgcataggatgcatatataatgtgtggggtgtgtttgtatatgtatgtgaggtgtgtatgtagtgtgtttatgtatgtgtatatgtgcatatgatgtgactgtgtgtgtacatgggatatgttgaggtatgtgtatgtatgtgtgcagagtgtatgattgttatcgtgtgtggtatgataatgtatgtgtggagtgtgtgtgcacatgtgtgaggtggaagaaccccagggggtgctagaatgctcaggacatgtgagaaagccaggcttggtccaactctcctgccttcttggggaaagcagggccatgatcatgagcctttctggatgttgcttttggacagcagtgtgggttaatagggccagtctctcctgaagtgccctgcccaagctcccactcacctctctcctccatctcttgaggaaagggtgaccgacctgtccttttaggaaaaggaagcttccagcacgctactgagtaaaggagccttactggtggtggtgaaggtgataccatcagaggggccagctcaggatcaggctggccttgcaatcttccaactgaatatgttagctgcagagtggggcaggagtcaggaggggacctacaaagcagtagaatctttgttcccattaccgggtgtaagtgcccagtgtgggcctcggtcttttctctcctaggtcacattcagacagcacacctttgcccaattttctttctggatctcaccgtcctgagtgttgtacctgcaggttgctcacagcctctggagcccaagatagtctcccctttgggaggaggctctacagtggtccctggcgaagttgtgaagaggtgactatcatctcaggcacatcaccttcccttttccctgtgggccttcctttgctgtttcctgaacaccatgctttctagttcctactgggagtgaacacaccttgcatggagcatcttcaggccatggctaactcatgctcccatcttgctcctgcaggtctgccacgtctctgtgctcagtgtcctctctacatcctgtggcttgagcctgagcttgcccatattccctggctggatggagtggctaagccctgatatcgctctgcccagaagagatgagtggactcaaacttctccagccaggaagaggatcacgcatgccaaagtccagggtgcaggtaagtccatctgtcactggcttgaggctaggagagtggacctgctcttgttaaaggcagtgttcaccatgtgtgtgtgtaaccggggttggagggggagagtggggtggggtgggggggtgcagtaaagagcagggcaggacttcacgaagtgccaggattcaaacaatcctacggcatttatgtgatttatcaccagtttgctgattcagggctccttctgcagtttctgctcctcgctggtggccacctgaccctgtggcgtttgctccttccacctgctgttggccatggggcagatgtggaggccaaggaagaataggacaatggcgtttggggcagacaggcctgggttcaaatttcagctctgcctattcctagctctgcaaaccttgggcatgtcacctgtcttctctgcctgaggttcagatttcttcctggtaaattggggctaatacttattagacttaccgtgaagattaactgagatgatgtgtgtaaattgcccagctcagctcagcctctggcatctggtactcaacacataactcttctctccactttctgtcttgcatctccccatcttgtttttgagtggatcactgaaccacaaatatccacttggcgatgaagtctggggaacagggacaaataccaacacttcccatttttagatttacacgagactaacagctttccttcccacagtggcaacagagatttgcagagcagatgtcttggtgtgaaactgctacgaggaggtgtcctgtaaatgtttgctgacaaagcagcaaagcagggtttgaccttccagctctgcctccccgcaccaggctgggggattcacccaccccactccgtttcctgtgcgttcctctttctcagaggctgtgggcctgtcctgctgtccgatggcatcaggctgtgggacggggggccatcaggttggttggagcaagctgctcccatccggacctgtgtcaggcagcacttgttcaagaggaggctcaagagagtgatccaggatgcagggtttgggaagaggatgcagcatggtggggggcgacctgtccaagcgcagagaacacttttccaaacctcactgccctgggccatcgggtgctcctttgcctttgcttggatctaatgattataggcctgagcttcaaagcaggttataaacccgactaattgctggtctaggagagctggacgaggaggccaagcctgcccagagtgggcaccccggactgggccttctcgtgggactggcatttccaaccgggagcgcggtgctggggccgggatacccggggtggccgcaccgtcctgctggctccttgggtggctgccgtcgctgctcagcgcgggtcggcggcgccgcctcccccaccccggcccagctctgctccggcaggtggaactctccccattcaaacccgcgcgggccaatcagggccgggcgcgccctggccgttccaacgcttggggcagccctacctcccgctcgcgctcctcccgccctggagactccggttactggggagcaacacagccgcctcgggttgcagacgctcctgtccgggtcgcagtgggacgccatggagcgctccctgcaccgcgtctccctcgggagccggcgtgcccacccggacttgtccttctacctcaccacctttggtaagtgcccgctggggctggcggcaggggctgcttcaccctgctcccagcgcccagaaacgcagcccctcgtggtgacaggggaggctgggagcaggtgctctttctatctaggggcaccttctctggcccctttctcctgtgactgcccaggaggggctcagggcacaggctcagtccaagcaagctgctggacaccacctgctgcccggccatgagtgccaactgcggttggttctgcctcacttggctggaataatcacgctctggttaatctttcagagacctgggttgtcaccacggagtttctcattagcaagcagctcaggttaaatcaaggtcttgttatagcaactggagatctcattcacccactttcctttggctcagggagcggacaggtgctgggccctttggccctgctgccttgtggggaggctgcaatttgactttgttgggtatctgagccacagtggagatgggagaattctctcctccaagaaagaacaatcccttaggagggtcccagggctgcctcagggtttgaggtggaaagaagtgaacagtaggcttcactcccaagcccctaagtagcagactgagttcccccaaataacagctgggcggcagctgcccaaaggtctgggcaaacctggccttcctggtagccatagtaaaggtaacaaccctacccttgagggtaacccttcatttcctcactggtcctgcaactctctgtggagaggggttatttttcctctgtgaagacttgaaaccaagagatcttccatgagccagtggcagagttcgtagctgagctcaagctttccagagatgacctgtccagcgcatttttgtttgaacttgcatacaatttccttctaaaggttggggctgttactgaaacattactggacattgcccagctttcaaagacagagtgcccaaggagtttggtccctccctggggttcctggctcttctgttttcaggcttactcctgctcaacatatttggttttccacaacctgctttttttccttaggggtagagggaatgatggaagagcagtggcttggcctctgaaattgcctgacgtctggcagcaggaattcactggtctagttggtggacgataaagggcaattaactagccatcatttgttgagaacttaccattgccattccttatgccaagtgttttacctgcattatctcacttaatgccccagcgtaggaggcaattcctgctaaccccattgggatgcagggctctgtgagacaagggtggtttccaggatgatctgtattggctggggtaggagtgatcaggaaagggtgtcagggagctgtgaggccctcttaccttagctgtgtcctgattaaaaagtaaaaatatgtttgcttttttcctccttattatcatggttacatgtgtttactgctgaaaacttagtgaaaagaagaaagtgaaaatcacttgtaatctgacttcccagggagaccactgttaactttctgatttatatcctcccaggcttatttccacacctatttctgtgtgtgtgtgtgtgtgtgtgtgtgtgtgtgtgtgtgtgtgcctgtgtgtatttaggggtcaaatttcaacacaattgagatcaagtttgtatggacaattttgtaacccatatgttttccttagtggcctgatgtgaatatttccttgcattggtccatgttcttctattagattaatctgcctgccagatctgggaagctgaggagggttcaggcccagcagggagtggatcttcctgcccagccatggcctcagggctgagtctgatgggtatcagggaaggctgctgcttgaacaagtgactgtgacctgagtgtgcaggaggcagacaggagcctgggtggggtgggaagccacctgctcttattcgtgcaggctcctctcacatctctctaaggatgcttatgagagcatttgagaaattctctcctgtttcctgcactggctctgtttccctgggtgccatttgtcgtggtgcccctctttcaggctgctgattttctttatccactgtgatcttcactgatctgcttatgagcaaagattcctatcagtggtttccaaacccagccaaatatcagaagcatgtggggagcctgttaaaaatacacagattcctagaatcttcttctggagactctagtttaataggtctggggtggagcctgagaatatgaacacttaagaagccatagagcgttcagactgtcatccaggtttggaagctatggattcagagtcagttttggtagcaattgggaccacttttactgtgaaggttttggctaagtttttctcagttcactggcctttccttagcaaagtaggtagcccctggccttctactgtgagctttgccttggtagaaccagatgaagatgttgcttagctggtagtttcctgagcacagacatgtaaagggagcataatcatctatggaaatataaagagacaaaactgttttgatgagaattcccttcggggagagtactgcatgatatatgtatttgtgtgtacacatgaacacaaccccttgtcccccaaaaggagtatgttcaagtgacattaattgaaggacactgcgttctgaggaggtggccttacttcaggggaagggagtaggcaagctgaggctaggacccaactactctagagggatttttttttctttattgtgaaaaatgatgtaatttgaagtcattgtaggtatacataatatttttctccaggattgtatattttattttgattaggatatttgctgatttttcttgtaacagctttattgaaatataattcagatatatacaattcactcatttaaaccatacaattcaatggtttttagtatattcacagagatgtgtaactattatcacaatttcagaacattttcattccctcaaaaagagacattatgctctttagcttgtaccgtcctcccttgtcccgagcccaaagcaattgctaatctattctctccctctgtagatttgcctgttctggacatttcatataaatggaatcgtatttttttttttatgactgacttctttcacttagcataatgttttcaagtttaatccatgttgtagcagatatcatactccattcatttttatggctgagtagtattcattgtatggctataccacattttaaaaatttattcatctggtgatgaatattttggctgtttctcccttttgactattatgaataatactgccatgaacatttgtgaacaagtttttgtgtggacaaatgttttcatttctcttcatatacacacagtatatacctaggagtagatttgctgagtcctatggtaactctgtgtttaactatttagggaactaccaaactcttttccaaagtaggtgtatcattttatgttcccatcagctgtgtatatgggttttggtttttccacattccttaccaacacttgttattatctgactttttaattctagctatcctagtgggtgtgaattgatattcactatagtttcgatttgcattttcctgatgacccgtgatgttgaacattttttcatgtgctcattatttatatatcttctttggagaagaatgtattcagatcttttgttcattttaaaattgggctttttgtcttgttattattgagttgtaagatttctttatatattctagatgcaagctccttaaccgatatatgatttgcaaatattttctctctatctgtgggtttttttcactttcttgatagtgttcattgaatcccaaactttttttggggatggggtcttgttttgttgcccaggctggagttcagtggcatgatcatggctcctctttgaccatgcagcctcaacctcctgtgcttaagcgatcctcccacttcagcctcctgagtagctggtactacagatgtgcaccaccatgcctggctaatttttcttatgtaaaaaaaactttttgtagagatgaggtttccctatgttgcccaagctagtcttgaactcagggactcaagcgatctcctgccttggcctcccaaagtgctgggattataggcatgaaccactgtgtccagccagaaccccaaacatttttaattttgatgaagttcaatttactttatcttttgttacttgtactttgtgttatatctcagaattcactgccaaatctaaggttctgtcagttaccaagagatttacctgtatgttttcttctaagagttttatagttttggctcttatatttaggtctttgatccactttgagttaatttttgtgtatggtatgaggtaagagttcaacttcattgttttttgtggctatccagttgtcccagtaccatttgttgaaaataccattatttctctattggatgatcttggtacctttactgaaaatcaattgcccataaacccacggcttatttctaggctttcaattctattccattgatctatctgcctattatcattccagtatcatactgtcttgattactgttgctttgtagtacattttgaaatcaggttgtgtaaatcctccaattttgttcttctctttcaagatcattttggctgtcctgggtcccttgaatttccatatgaattttaggcataatattttatatagaaaataaaaaaactcaagttcacaaaaatgttggatagatagttttaaaatatcatcttgaagggataccaacttattagtttgactgatgaagcaaattattaatttacctggggtctctgaaccaaattttaacttgcttgggatctctagtcacctggatatggtgagtggtcaggagagagaacaggttgccttttctgcagggtatctgggtctggagatggtgggcaagctggacatgttctgaggtctgcaggtggctgtggacattgggtgacaaaatgcacctctctttagaaatgccagccccctatgaacctacaaaatgaaagctgtcgggagcagctctaaatgtaggctcgagaggactgcctggagtcactgatttgccatagggaagttgggaagatgtggttctggaggcagagtagacttaggagtgtcattgatttgctcagcattttttttttttttttttttttgcctcatgtttgttgtgttggtacaatgttagctggggcctgtttcactcctttctctgcctctctttagaagccgtggagataaataattcattttctgtagtgagagtgaagcttgggaacagatgtcagccagctgcgtggtgtgttgggcagtgcacggtcaggccctgaactggaggccttcaatgtgtccctgccagctgcccctggctggcacgtgtttccagtcccactgctctgagcctgggagattccctggcatggttggggaaacctatccaactgtttctcaggagctcatcatttgctggtcatactcctcagcatttattggcttttctgtcattcagagtccaactgctcaggagctttcagaaattcctcaaagtttctggcccatagatagccctttgtcctcttttcccattctgctttgtgtgttcttcttaaacatttaaaaaagtttgaaatattatacagacagacagaaaagtgtccccccaataatgtgcaatccagtgacttctcacaaaaaaaaaacctttgtaactttcaccagagtcaaaaattgaacatttctagtatttagaagacgcatgttgataatgcagtttttttctttatcatttacttcaaaatattttctaattttcattgtcatttctttttcaatccttgggttagttagaagtatatttctaaatttctaaatattggggattttctggtaatatttttatatttactttgcattttagtcagagaatatactctccatccttttaattccttgaaattaatcaaaatttacttgatgcctcagcatatagttgtttttttttttttttgtcgttgttgttttgagactgagtcttactctgtcaccaggctggagtgcagtggcgcaatgtaaactcactgcagcctccccttcctggattcaagcaattctcctggctcagtctcccatgtagctgggattacaggcacccactaccatgcctggctaatttttgtatttttagtagagatggggttttaccatgttggccacactggtctcgaactcctgacctcaggtgatccacctgccttggcctcccaaagagtcaatttttataaatgttctttgtgtatttgaaaaggattctgcagcagttgggtgcagtgttctttgtgtatgtcaagtttaggtcaagtttgctctttatattgttcaaatattccgtatccttgttgatttttcctgttttctctgtcagttcctaagagaggtgtattagaattcccactgtgattgtaaatttgtctatttcccattgcagttctgtcagtttttcctttacatatgttgaagctatgttaacaacatacagatttagaattattatctttctggtgagctgaaatttttattatgaaatctattattgttatgaagtcttctttatttctagtaggtataaagtctaattttcctgatattaacatagctaaccatgcttctttcatttaatatttgcctgacatatctttttccatcctttttctttcaacctttttggatctacattgtaggtgtgctgtgtctgctgcaaagaacaggcacatggctgggagtggtgagtggcccatgcttataatcccagcactttgggaggccaaggcaggaggatcactcaagcccagaagttcgagaccagtgtgggcaacatagtgagagctcatctctacaaaaaataaaaaaattagctgggcatgatggtgtgcacctgtggtcctagctacttgggaggctgaggaaggaggatcacttgagcctaggaggtcaagactacagtgagctgtgattgtgatactgtaccctagcctgggtgtcagagtgagaccctgactcaaaacaaacaaacaacaaacaaacagtataggcagagagttgttgttattattattattttcttctcaatgcagacctaggatgatattttccttcaaaaaatctttgttcgtttgtcaggtgcctagggtcactgggttagtcttaattcagtgttgggactgagagtacttgaaatcgagctgtagtccctggagtagctgtgtctgattacagttcactctattcctatggagcaacccttcagggtccctatgcaaaaggtggggctcagaagaaccctgcttcttggtgggccctggtccctagttcctattcctctagccctgagaagcaggcagaaactcactcagtctcttgatctctcaatcagccctctggaatttgaaaacaccccaggaggaaattagcccagaaaaacactaggtttccttctacagtcctccattcccctagatcctgcctggtagctcctctctctcttgttgtttatctaagaagatgctttaacatattttgtttagcatttctagttttcctcagtggatctgtcatcccagaaatggaagtcccctacatatattttctaagcttttttgagttggtttttgtttttttttccctccctttctgcctctctccctccttttctcctccctccctgcctcttccgtcccttcctcccctccccgctctctctctccgtccctcctttctttctccctgcctgcctgcctacctgcagttgtccgagcaggcattactggggctggagggtccctttccaagatggctcattcacatggctctcagcaggaggcctcagttccttgctacctgtaattaggaggcttctgtttctcatcgcatggacctcttcgtaggattgcttgagcttccttattatgtggcagctggcttccttctaggcaagtgatacaaaaatgaaagcaagaaagaactcccataaaaagatgagtaacccagctcaaaaatgggtaaaggatttgaatagacatttttttccaaagaaaaatggctaacagcatgtgaaaaaatgctcaatgtcattagttatcagggaaatgcaaatcaaaaccacaatgagatactatcatactagaatgactataataaaaaaagagccaataacaggcgttgaagaagttgaggggaaattggaacccttgtacactgccggccggaatgtcaaatggtgcaaccactttggaaaagtttggcggttcctcaaacaattaaatgtagagtttccatttgacccagcaattccactcttaggtataaatccaagaggaatgaaaacacatgctcacacaaacatgtgtacacacacacatgttcataacggcattattcatagtagccaaaaagtcgaaataacctgaaatatccatcaccagatgagtggataaacaaaatgtggtatatccatacaatggaatattatttggccacaaagggactaaaatactgatacgtgctacaatatgggtgaaccttgaaaacattatgctaagtgaaagaagtcaatcacaaaagaccatgcgttgtgtgattctgtttacataagtatccagaataggcaagtccttagagacagaaagcagattagtggttgacaagggctgaggggagaagggaatagggtgtgactgcgaaagagtatgggatttcttttaggggaggatgaaaatgttctaaaattagatagaggtgattgattacagaatcctgtgaatatactaaaagaaaattacatgctttaaattggtgaagtgtggccgtgcacggtggctcaatcccagcactttgggaggctgaggcgggtggatcatctaaggtcaggagttcgagagcagcctggccaacatggtgaaactctgtctctacaaaaaatacaaaaaattggccaggtgtgggtggtgcatgcctgtaatcccagctactcaggaggctgagacaggagaataatttgaacctgggaggcagaggttacagtgagctgagatcatgtcattgcactccagcctgggcgacagagtgagactccatctcaataataaacaaaactgatgaaatgtatgatatgttaattatatcccaatacagctgttaaaaaaagaaggaactaataatacctttaatatcctaatgttgaaagtcatccactgtcatttctaccacattctatttgttagaagcaagtcactaagtccagcccatgtctgaagggaggaactaggcttcacctcttgaaaggaagagtatcaaagactttgtggacaaattttaaacccatgataggtatagagaggctaacagtgggggccctggactgcctaaatgcaaaccccagctctgccacttactggctgtgtgatttggacaacctgttttagctattttcttttttttgagttggggtctcactctgttgcccaggctggagtgcagtggtgtgatcatggctcactacagcctcaacctcctgggctccagtgatcctcccacctcagcctcctgagtagctgggactacaggtacacaccaccacgtccggctaattttaaaaaaacgtttttggagagacagagtcttgctatgttgcctagactggtctcaaactcctggcctcaagtgatcatcctgcctcagcctcccaaagtgttgggattacaggtgtgagccaccatgcccagccaacctgtttacctcttaataatcttcagcttccttgcctgtaaattgggataaaagtagtaaccatttcacggagttattgtgaggagtaaaagaaataaaaagcttatagtaaagtgctgagtacctagtaaacatctaagaaacattgactttgttctctccatgtgtgtgcctagcctggtagttcactatggccctgaactctgggttgagatgtgtgtgaatcctgtaggatgtttggatctgagccccacaggactgctagtggtgttatgatccagccaagattagatgctgactgcagtagattcaggagttttattttaccagcttgcccaggacggacctagaatcccttgtgagtgatccatgggaatctaaattatcaagagactgaatgctaatttattagtttatgctgaaaaatagaatttctgagtagactagaagacttatgctggccggagcaatctctttctgtaaggaaaaagagcttgggaaactacattaatatcagctttcacaggaagcagagaggccaggggattgaactgacccatcacaatttttatgccagtgctgtgtgtcctatgtcctcaccttcgcaaaccagggccacttttttgaatggaactcagggttctccttcttttaacacagtagccatgggaaattctcctgggttatgtccatagagctgtgtggctgcctgtttcccagcgccactgcagcctaccatttctcccttagatcaagcaggcagtgaaattggtaaacacatgcttaaccatttctgagcctggatcagggctggggtgtggatgaggcagctgaagaccacagagagagggcgtgcctggcatctggctgggcaccctccctcctgcgaggaagacttgagtacagacgtgtcctcataaacggaggggaaatctgtggatgttagcggctggctaggctccatgtagacccaactgccttcatatgtttgtctggatatcatcacccttcctgtagcttttaacatgtgacagttcttaaatgggcagcggcttctggggtgaattggattttaggatgcctgctgcttcatgctagccaggcaagtccatcatagatgtattctctgcacatctcagggtggcatgggctcccactgggacacattccggctgatccctgagtctagcaaaggtgtgcagtccccatctacttcctttattttctgagtatgtctctttctgactgtggcctgtgggttagagttcatctgtggttctctactgagtattgtctgccagactgaatttctttagctggtgtccacatccatttaaaagtgcccagtaagtctgagcccttcaagtcctgtgcccagcagaatttgggtttgttgccttttccaggctttctgaagctcattcccatccagtatttttcctgccatatggggccctgtctattctccctttggctctgggccctggtacacacttgcagcctctctgggcatccatcaccaccaccttttgcacatagtgttggtgcccaactgcgatctcatgggaacaggggacatgccctgtccaaaggccctgcccaacctcgatgaggatgacttcaagccctttagcctgactgctccctgagtctagggaggaatggggagtgttgaaaaaaacagaggtgtaggagcaagaatattattgggaaaagttttaggtttttgttttttgagacagggtctggctctatcatccaggctggagtacagtcgtgcaatcatagctcactacaacttcaacctcttgggctcaaggaatcctcctgcctcaacctcccaagtagctgagactacaggcacgcaccacggtgcccggctatttttttaattaattttttgtagagaagggctcttgctgtattgtccaggttggtgtcaaactcctggactcaagcaatcctcccacctcagcctcccaaagtgctgggattacaggcatgagcgaccacaccccacaaagacaagtttttaaaggaacaagcaaatttcagaacaatacatagggtatgtatctgtggagggaggttgggtggggggggtgttctgaaaggatgccaaattagctggtgcttcggtgagctgaagactccagggattcagccctacttccccttcacctggaggtttctttctctagattggagacatttctaggaggctgccctctattttttttctttttcttttttttcctttgagacaggtctcacgctgttccccaaggtccaggctggagttgcagtggtgtgatcatggttcactgtgggctcaacctcctggattcaagtggtcctcccacctcagcctcccaagcagctgggactataggatgtgccactatgctcagctaacctcttggtttcttgagaaaagctgtggcacctggtgctgtccccgatggttctctctacctctgaatctgaaggttgtgttggcaaacgcagtgggcacagcagaggaggtgcgtgctagagggctgtgggtgttccagaagactgtgcacaggaaagagtgctggagtgggggtagagttctaatctccagctctggattctctgggcccagagcaaatcaccttccatctcaggcatgaccgttctggctacaaaatgaggagactggacaagatgacttcaggggcctgtgtgtcagacatttggtggagtagcatgatggggggaaggaggggacaggcatggccgagggagggatcttgtgaactggggcaggtgtgtcctggcctggggagcctggagtctggtctgctgggtttggtttctctgctgtaacagggtacagggcaccctggccttcctgagaagcccctggctggcagggcctggaacgggagcagtgcagtgtggtgcaaactcatctcaatcccgagtcagcctttgcccctgggcctttgtcagcctccagcttctcacttggccttgcccaagtccctgtcctagccactgggctgtgagccctgtgagggcaggcacctgcccagcctcgtgcagatgcccagcaaatatttgctaaatggaattagtgaccatttgtgtctggagatttcctgatcctgacttctgggcaaagggccactgttagttaggtgataggtgttgtggagcacaggggttcctgtggctttcggatccaagcatgtttgtgccagagctggctttgcacaggtagtagtttcagaaaaaatgtttcatgttaaacataggtgtctttgagttggtgaaattcaacccatgactgcgggcttcgtttgcctgtttccaaacctctctctctcccaccccacactagattgggcacagttttcataggtttctcagctctaggaagccacaatgaagtaattgctcagactttgagataatgataccgtcagttctcccggcgcctttcatccaaggagtcctcctcacctgccagcattatctgatcacagcttggagagtgccataacccctgttattagctctacctcacatccatggccactgtggtcctgaaagaagagggcagttagggctggaactgaaacaggattcctgggcttctgagatctgggtcctggacaggagaacagcagatatttctgatggatgacgggctggaccagggtttgcaggagcctgaattgcttgggactgaagcttaaccaccagaagtatgagggtcaagtgatgtctgggtcacagtgattggtggacttatgcagagttaggagacatgaagggttctccaaacctgttctctaaccagaaacaaagcaaagccccagctgccagcctagtttcaagaggcatgtccagagctggccagatgggatgatgaggggatgtctcactgtgctgtgagggattgtggaaggactttggagttcaggtctagaggaaagagcccagagaatgcagaactagatccgggcaatgaaagttaccgagaggccactgttggcttaatataagatgcagcattgaacaatcagagctctttcaaaagggaaagggctcccaccacaggaagcaagctccccattgctacaggtgactgggcagagggagggcacagctagccagggttgtcacagatggagccatgcctgggctttctggtagacggccctgccctgctttctgatgtctccagtgcctgtccatggggtggactgagttcagcagctttttgaggtcccagggaaagtctactggactgagagaaacattttcgatgtcaccgaggaagaggagtgtgaccctctctctcttctctgtcttggctggaggccattgggtatctgtgaggatgacctgaagttttgtcctgttttttctttttttaaaaaatttaaacaaaaatgggaaaagccaggggataaacctcacccggccactcattcttgccctgccttccagccccgtccttctgttctctttacatgtcccctccctccctgttctcctcccttcctccctgctctttctcttcctcccctcctttctcctgcctctttccttcttcctttgtttcctctttcctttctttttaattatagaagtgctatagttcgtggatatatttgaattattaaaacaacaattgtgatagattgaaattcctcttgactaccctcctccaattcctagtctgttctctagcagggatcactgtttttaatttggcatcctttcagaaccctccctcccccgccagatacataccctatgtattgttctgaaatttgcttgttcctttaaaaactcgtctttgtggggcgtggtggctcatacctgtaatcccagaactttgggaggctgaggtgggaggatcacttgagcccaggagtttgagaccaagctggataacacagcaagaccccttctgtacaaaaaattaattaaaaaatagctgggcaccgtggttcatgcctgtagtctcagctgcttgggaggttgaggcagaaggattgcttgagcccaggaggttgaagctgtagtgagctatgattgcacgactgcactccagcctggatgatagagccagaccctgtctcaaaaacaaaacaaaacaaaacaaaaacctaaaacttttctcaataatattcctctgccaggttgtatggtgctcctccattctttataacagctcatactattccatatacagctatagatggtttacttcactatttctatattgatgaacatttcaggtgtttccagtttttccttaaacaatgctgtagtgccagcctttgtgtgcacgtgcttgtgtttgtctacgacagtgacctggaatgaagacttttaggtggaagaatatgcacatttaaatttcagtagatcttggcagaaattaccctccattttcactccttccaacagagaatgacagtacttgttctcctacacctttaccaacatttgacaacgacccagcagtgagatttcccagcatccacctggctgcctgtacagtagtgagctccccatcaccagaggggcacaagcaaggctagagaaccactgctggaggcattcgaaagggactcccgatgtggtgggcggggctgaaccctgtggcttctgaggtccctgccagccagagacttgtgtgagtctttgaatggcttcacatgaacaaaagagcatttctgtcacctttcctctagttttttccaccacacccaccagggagctgaggcaaggttgtttctgttgctgtttccttaggtcagctgaggctgtccattgatgcccaggaccgggttctgctgcttcacagtgagtacggctttgtgcaggctcaccaaggaaggggcgggccactcagcttgctgcctggggctggggttgggggatggtggcaccatgggccaaggcttcttttctcatccttgtataaaggatgtgtccattgataaaagccagtattcacctggggctctttctatagagcagccctggtcctgccttggatgtgtctggagtccacatggtagacctttctcattgacaggctacagctgcccctgggtacctcaacttccttcttggccccagcagagcagggccacagaagagttttcctatcttccctcccttctttattccatcctttcttcttttctctatttttctcactcattcatttattcattggttgacaggcagcatagtatcatggttaagatcatagtctttggagccagaccactataatttgaaccctggctctgatacttgttgagtggccttgaacaagctccgttttctcatctgtcaagtagtggtggtaatactatgtatcttacaggttgctacaaagattaagtgagttactgttagtaaagtgcttagaacagtgctgaacttgtagtcaatcctgtgtaagtttttgttagataaaatagaaaactggctgggcacggtgactcatgcctgtaaacccagcactttgggaggccgaggcgggcagatcacgcggtcaggagttcaagaccggcctggccaacatactgaaaccccgtctctaccaaaaatacaaaaaaattagccgggtgtggtggcagatgcctataatcccagctacttgggaggctggggtaggagaattgctagaacccaggaggtggaggttgcagtgagccaagatcatgccattgcactccagcccaggcgacagtacgagactccgtctcaaaaaaaaaaaaaaaaaaaagaaaaccatacattccaaaaatagcgattgagcattagctctgtgctaggggctgggaacaccaaggagaagcacccacccctgtctagatggtgttgatgggatgccagggaagacttggcggagggggtgatgcccacacggtatcctgaaggaggaatgggcctgagccaggcaaagaggagcagggagggtgtggctagcacttcatgcacagggctagcaagtgcaaaggcctgggggtcagagagagcaggatgcatttgaagagctgtctagcatggctggagcacagcacaggaagagttcatactccacctgtttgtctgtccatgtgtccatccttccatccggcacatgaatagttacatgagttgctgtcatggcccccactgccaggactcttctgtttagcccagaaggccctgtctatctctccagcctccctggctcttgccgctgacggtaccctccacctccagctctatccagttacatgcactcccttgaatacatcttgcttgctcctgcctctgtgcctttgcacctgctgttcactgtgcctggaataacctttcttttgttttgaaccccttttgaaaaataactctccacctgctctgattttgcaagaaatatgcctgccttcatcatcattaagactcaggaaggaagggtcattttgccttattatttccccctccaggaatcatccccctgacccacctgtctgggctgggtttattgctttctcctttgtgtctttgtcacagccctgactatactgtgccacctgtgtctggcctctctgccagactgagaatgcaatgaggacagggactgggtgtggttcattgtcactgctggccagagagacccaggaggtcaccagacctgggtcctgccctcaagaaccacgccctcgagggaaatgatgcacacaggaacagtaaccaggatactgggcagagtagactagtaggcgcctgggtcctctggtcatggccatggggggcccaacgtgaagttcccaaggagcagcagaggggtgttctctgcctgccagggcctgactccagctgtgcaaacagtttttgcaaaatgcatcttggcctccaccactccatttgtcctgcacagtttgctttggcttcaccccagtctcaggcccttcatcccttcccaccggtccccactccttccattggtttcccaggccttgcacctcagactactgggagcactgtctgagccaaaccctagggctcaatgaaaaccagacgtaaggctgggtgcattggctcacgcctgtaatcccagcactttgggaggctgaggcgggccaatcacctgaggtcgggagttcgagaccagcctgactaacatggagaaaccttctctccacgaaaaatacaaaattagccgggtgtggtggcacaagcctgtaatccccgctacttggcaggctgaggcaggagaatcacttgaacccgggaggtggaggttgcagtgagccgagatcgtgccattgcactccagcctaggcaacaagtgcgaaactccatctcaaaaaaaaaaaaaacaaaaaaaacaagaaacaaacaaacaaaaaaatccagacgtaaaagaaaatagaactgaggctcaggttctatcaggtctattgtcttctttctatagacctcaggcaaatggtgctgcctactcttgtgaccacacctgcacccaccccacacctctccccttgcctttatttattattatttttctttagcaaacattttttgagcaattacttatttgccaggcactcctctgagcacttcaggcacattacctcatttaattggaacaactaccatgtgaagtgcatgttattatcactaaaccattaaaaatggcaaattctgtcccatgcaaagcaactcactctagcttatatggtgagtaagcggtgcagctgggattcatgcctgggtccgtccacccctgaggccccagcttgtgactcctgtgctgtgctgtccgccagccacagcacggctcacggcacaccgtgagtgccacggcatggctcatggcacatggtgagtggccccttcattcctagaaggcagtcttgtgtggtagagcactgagccgggagtcaagagacatgggttccaaatccagcggtcattcccattgttctgtgattgtgggcaagtttcttactatcttgggttcccctcgaagcctcattttccccattacatgaagggttagattctataaactgtagttctcttccagctgtaagattcagggaattgaatgtacctcgtaatgcattggtgagggtgctgccagagagtggaagatggtgggaatggcctagaccagagcaggttcatagccaatggtggttatgcagattaagggcctagtagcaggggccatagccctgctactcacagatacgcttttcttttcaggtctctttattcgtgtggatggatatgtctatgtgtgtctctctttctcgctgtgtgtgtgtgtatgtttccattcatccaccccaatgtctgaattctcttttagttatagaaggtaaaggcctgatcagcaaacagcctggcacctgtgatccgtatgtgaaggtatgtggtggggccggagatggagagtgggatattgaggggccatgttactgggctcagtcccaaggtcccagcacacctgtggggctggtgacctttgaggaggcagttgccatctcactcatcttctcaataggcatttattgggcccagtgctgggacaaacccattcccttagctcggctgggtccctggggcttcctgcaacagccaaaatcttaagggcgatcttggtcatctatataggtgggcagtgagtatgtggatggctgaaatccacaggtaatcccaagacctcttgtgaaaagcaccgttttcacccactttccccccaaactaggggcaggatggccagatttgggcagtagagtggagggagtgtctctgagggctggaagatccttctgggttgggcttttgctgtaaagacagggtccttataggggtggggctctactttcagtgagagccaaaggccaggagcttcctaaagtgtggcagctggggttccaggtgctggccctcagcattcttcctgaagccttcaggctgatcagaagcccctgctggcaaggaatttatcaggagcagggctagaacagccctgggttgagaacatggatttggggccttggcagaggctgacctggagccttcgtgaagggagcactcagcagctgctgggaccttagaagagaggagtcctttcgcttctggggaaaccactctgcttgggggaagagcagagatgataaagttgtaccccagctctggctgggccgtggctgcctttttggtaccacccaccatgaggccctgtcctggcatctgcctccaatgtctcttgccctgggctccttgttcccttgcagcatctgacaggggactctattctgtcctctgcagaggctgacttgaaggaccctgggaagcctttaacttggagatgtgcagagtcagctgctgggcttaggtgggccatgagatccgctaatcatgcttccttttttccaattcaagatttctttgatccctgaagatagtagactacgccaccagaagacgcagaccgttccagactgcagagacccggctttccacgagcacttcttcttgtaagagtctggtgcagctgggccctagaaaggagagggaaggagtgtttatctggaaacagctctgtttgccaaatctagaactagatctatgcaaaaaaaaaaaaaaaaaaaaaaccaaaacaaaaaaaaccagtgccttctaaaggatgtctttgttttctcactcacttgtgtccttgcatccctggcaccaggcccagcagcgaggtccacagtgataaggtatcacttggctagctctcataactaaaatgcccagcctggggctggcagcccataaaaagtgtaggcaatttcccactgtgccttgggccaagctttctcctttagccgaaggaattttccaagctgaaggatgttttgcctccctgcccccctttttacttcaactttctaacctctctgagccttggcttccttatttgtaaaatggggctaataatagtagcaacctcagagagctgtggggtataaatgggacagtataacataacacagggtaccagctattattgttattatttctttccccaatctctgaactctggggccaatgggaaggtaatgtacattttgtattttcctattagtgaaaattaatattttggtttttctcttactacataaagtagttttggttatgataggaaaatagaaaatatagatgagtaaaaagaagaaaatagaaaacacctatagccctcctactcacagatacgccctactgtatttcttttcagaccttttaaggtccttttcagaccttttcagaccttttaatgtgtatgtttgcgtgtgggtgtgtatgtttgcatgtgtgtgtgtatatgtctgtgtgtgtatgtttacaaaaatggaatttttttttttgagatggagtcttgctctgtcacccaggctggagtgcagtggcacaatctcggctcactgtaagctccgcctcctgggttcacgccattctcctgcctcagcctctggagtagctgggactacaggcgcctgccgccatgcctggctaattttttttgtatttttagtagagacggggtttcaccgtgttagccaggatggtctcgatctcctgacctcatgatccgcccacctctgtctcccaaagtgctgggattacaggcatgagccactgtgcccggcccgaaaatggaattattttataatagcatgttgtaacctcctttttgtccttaacaacataatataaactgttttatgcatggaggtagtcatctcttactttatttgtaatatagtttatttaaccagctgttgacgttacttccacatttttggaattatgactgactctatgagtcagctatggcctggagctcagcccttactaacactccgatggtctgattgatttcgcagtcctgtccaagaggaggatgatcagaagcgtctcttggttactgtgtggaacagggccagccagtccaggtgaggagagctgctgagctggagggggactctgctctgggctagtgggtgacagccaggtggccagcatacaccaggggttcgattagtgctttctggataaatgagtgatagtggcaatactaaattgcagaggctgcccctccttgagtctccatcattccaggtgttaccaaggactgtgttatcaatgagcatttgctgagcactcggtatcaaacaaggcactgtgctggtcactggggaagccgaccagcctacacatggaaatttattctcaaggtgtccactgttcacgtggggacaccaggcactgcatggagagaaattacaataacaacatgtacgtgctcagttctacaggactctaagcaccttgaaaaacaggactatttcttttttagtcatcacagtacctagtgcctggcatatagatgtttattagatattggctgcatgaagaaaagaatgacatgagtaataaaggccatcagtatgggaagagggagagttcactgtggtctgagatgatcaaggaaggcttcatggaaaaagtggaattttgaacttgggcacagatgaagaataagacaactaaagaagaaggttggaaatggcattccaggcagggcaaagcatgagcaaaggcaaggaggcagaaatactcactgtaagctaaggctgccatgatgaggccaggtaagggagtatagaagttttgtgtaggagaatccaaacaggctgatcttgcaggcagtgcaggacacaggagggctgaagtggccattagtgacggcagttagagcggagcaggggaggagtgccgggcaggtgagcatgagaattggctgttgagtgacagcaatgcactgccatggcccactgttagcggcagtggctcatttggctggtgcagcctaaggaatctgggataccccatggtcagtatcatttgcggagcaatcacatcactgaatggtgactgaaaaggggcttccgtgaatgaaaatcagctcaagtcaccagctgagacctggaaaacatttttgggttcaatgctctttagtactctaaatgttattagctaatatgttttttaaaatcggggtgtatttaacatacaaaacgaaggatttctcttttaataaagtatccacttttcatcctagggtagtatagtacaataaacctcattcattcattcatccagctgccatttcctgggtatcactgtggcaacaacatgctggggatgcatgcatagggtcaaagactttcctatcggatcaccgatagagacttggagctgagagtgaggagggggacgtcatgttaataacaatagcaattgctgactgggtgctgacctggagccaggggttaacagtgcattgtctcatttaattcttttttttttttttttttttttgagacggagtctcgctctgtcgcccaggccggactgcggactgcagtggcgcaatctcggctcactgcaagctccgcttcccgggttcacgccattctcctgcctcagcctcccgagtagctgggactacaggcgcccgccaccgcgcccggctaattttttgtatttttagtagagacggggtttcaccttgttagccaggatggtctcgatctcctgacctcatgatccacccgcctcggcctcccaaagtgctgggattacaggcgtgagccaccgcgcccggcctgtctcatttaattcttacaacagctctaagaagagtgtggttttgtcctaagttttcagaagaggaaactaaagtttagagaggttaggaatttgcctaaggtcatacagccagttaacaatagagccgggatggaatccaggtggttggaccccagggtctttcctctcaacactgtactgactcatgggtggacaggtgaaaggacagaagaaagagccagtaaagtagagagggaagggcagggcaagagtggagtgaggagggatctgcaaactcattgacgttgctggaaggttaagtacaaagtagggactggctaaagattagctgaagaggttggtataagccaagtcagatgattctgtagattctctttggagtatggggtttctcctaagggccggtggttctcgatcctggatatacatcagaattccttgggatgcttgtcaggaacctagattcttaggtgccgcgtcagattaattacatccaactcttcatgggcagggctgagaaatctgcatttaaacatgtttgcagggtgaacctcctgcagtcactttggtgtttgggaatgtctggccattgggagatactgaagtgtgtcaagccagggaatgatggatgcacattctagatctatcactttggtaggtctttggaaggttgaggtgagagagaggctttggggctagggaggggaaaacagactcaggccatatttaggagattaaatcagtagtgcttagtggtgatttggctgtgagagcagtgtgagaagtcaagggtaactcctgggcggctggtggtgtctccacctaagacagagttactggaggtggaggtgagtcagcttgggatacggtgagatgcaggtgcttggaggggagccaggtcagagctgtgaagtagggctcacctttgcctacctggaacttggaagacagagatatgggagccatgagcaggaaggcagtgggtgaaattctgagcaagtgagattgtcaaggaaggtcatcgaatgctaaggaccaagggtccgctccctgtctttgaagggacaggccaatgaagggaaggtcctgaaggagacagcagagtgtcagagaggcatatggacgcccagaaagccctttgggtggaggcagacaccaaactgctggagaaggagccggtcatgcccttcatggcttttggaaaagaaaatgaggccagggaaagtgagtcagcgtcatggggcagtgtctccacgtgttgcctattttgggaaagtgagatgccttattaaacaaactacagccaaactcacggtcacagtcccagcccgaagctcaggaggatcagggccttgggagcagagggccctgtgaagctgtgagcagcacgcaggccggcctggcctccttgcgctctccttttcctctctcctttatcgatccatttcggagcgagaaggcctctgagctggaggaggcagacagagtgattgcaggaaacttcggctctgctgaatgctctcaaatcaaattgtgcctctctgaaggatggacattcaacttatcaacatgaaagacaattgtggaaggaaggaaacaaacatttatggaattcttctctgtgccaagcactttacatacattatctcattttatcctcatcatgatcctaagaggtaggacttattattgcccctctcttcagagaagaggaaactgaggcttatgaaagccgaggcacttgcttgaggttatgtaacagctcatatttaccaagcacttactgtgtgtggacattaagcacatggcactcgttctccaatttaaccctcacaacaacataagaggtaggtattattatttttgctcttttataggtgaggaaacaggcacagaggcgttacataacttgcctaaggtaacacagatagggtgccgtgaaaacaagatgtaaatgcaggcaagctgacgccaagtccaggttctcgcagctacattacggtacacttgaccatctcacatggatgataaatgactccaaagcatactctttctgtgtcagtatgcttgctcctcaggactcagggtgcttctctttgcatttatagtgtagtttcattgattgattgagacaggatctcactctgtcacccaggctagagtgcagtggtgtgattagagcttactgcagccttgaactcctgggctctaatgaccctccagcctcagcctcctgagtagctgggactacaggtacatgccaccacacccagctacttaattttttttttttttttgtagagacgatgccttgctatgttgcccaggctggtctccaactcctggctgcaagtgctccttctgcctcagcctcctaaagtgctaggattacagacatgagctaccgcagaatttataatggagttttatgtaaattattcagccaaatgtgtggtggtcacattttgaaactgataggagataacaggaaagcatctgtttcactaattctcacgatccttccagggatggctgtgaacttgtgttagagaaacaagatgatctacaaagaagttctggggaagggccagatgatttcagttcatcatggtgatcacagtgggaactgaggagaaccaggcctcagcacagtagattttggcttagctttgactagctgtatgaccatgggtcagtcccttccctgcgctgagcctcaatttccttgtctgtaaaatgcagtgatcactaatgtttctttcagcttcaagtttctgggagttttttataggcactttcaaatgtgtgcagaggtagaaagtatcatataataaaccctcatatactcatagcggagtttcatcaattatcaatatatggccaatcttatttcatttacaccccatccactttccccttctccagtgaattattttaaagcaaatcccagacatctcatctcatcggtatatatttctaaaagatggctttaaaaaaaatcatgatgacattatcacacttaaaaattaatagtaattcctcaatatgccattgaatatggaactcagctttaaaaattctgtttgataatatggcaaaagacaaattgaagcttccagtattaatcagaacttgtggccagggaacagacttggagagaattataatgttatgtactaaggtaaaaaatgcatatatgtattatatttatacctccaaagattatgttcaatatataatatattattataaattatataatatataaaatataatatattatattatattttatattggtatatataattatatataacttaattataattatattggtatatataattatatatataacttaaatataattatatatcgttatatataattatatataacaattataattatatcagtatatataattatatataacctaattataattatatatcagtatatataattatatataacctaattataattatatatcagtatatataattatatataacctaattataattatatatcggtatatataattatatataacttaattattatatattggtatatataattatatgtaacgtaattattatatattggtatatataattatatataacttaattataattatatattggtatatataattatacataacttaattataattatatatgagcatatagaaattatatatactaatatataattatttatatattatatatattctttatatattattatatattaattatatgtaaacattatttatatatgtaattaaagaatgttatatatatgtaattaaagggcataatctttttttaaagtaatttttttttctttttttttgagatggagtttcactcttgtgcataatctcagctcactgcaaactctgtctcccaggtagcgattctctggcctcagcctcccaagtagctggcactctgcaggcgcatgccaccatgcccagctgatttttgtatttttagtagagatggggtttcaccatgttggccaggctggtctccatctcctgacctcaggtgatccacccgccttggcctcccaaagtgctgacattacagccatgagccaccgtgcccaggcaaggacataatcttttttttttgagatgaagtctctctctgttacccaggctggagtggaatggcgcgatctcacctcactgaaacctccacctcctggattcaagtgattcttctgcctcagccttccaagtagctgggattacaggcgcatgccaccacgcttggctaattttgtatttttagtagagacagggtttcaccatgttggccagactgatctcaaactcctgacctcaagtgatctgcctgccttggcctcccaaagtgctgggattacaggcgtgagccactgcgcccagccagggcataatcttttatactaatagtaggtacatttagggagattctacttgtgatttgccctgcactgtcccaggcactgtaagtgtatgctctcctttaatctgttttataaatgagatctcagtgccaagtacagtggcctaacgtcagaaagcttgtgaccagtgatgggtactgagcttaaggaaaaagtgaatggaaaaatctaagttcaatttaagtcatcaaattaaatataaattaggattaaatggtataaccctgtaacagaaataatttacctgagagggagaactaaagtgcatttcctcaaaaaataatctattttttcatcttgtaatgagtctgcaaccctatgctcaaaagtaaactgaatactattccccatatgtgctgcatgaagttacttcaaagcctttgtaacggctgttccctctgcccaaaatgctcttcattctctctggctcagttcataggtcttcttccagcctgtgagccctaaactacctcttgtgtccccgagccttcagaatttgttgcctgcactgttcatctgtcaatcgcaccctgtcttgtgacatcccctgtattgctgtcttgaactgctatttaaattcctggatgtttgtgttgtttccttaacgctgtggctccttgcccagtgcctgccaaccgtggacgtgatggattcatccatttgtcaagccttcactaagtgcaccaagcctggagctcagggactggtagtcagaattaaccaaggcttggttccggagactttgcatctagtgagagttcaggcactcccgagggtgagcgctagttcccaagtttataaactgactgctgtattgtcatatactcaggttgctttaaaagaagtctttcttcctccaaagatttttcaaaagcaggcataagaaatagctaattgaagaacacttagagagaggttcctgcttatggacattaattgtggcaatttacgctgcctgagttaccatgaaagcatgggaggccccttagcaggaagtaaaactcgagggaggctattaaccatttaacattctctaaacaccagggaatgaagatttcgcttagtgaagagcagagagaggttgctgagctaatgcattggcctggagactttgaaagtttcagccctacccagtaggaaagaagtgtacaacagagtagtatgggcacctggatagcagctggagttctcttgaatgtgtgacaaataaaatgaaattggtatgaggactttggcaaagtcttgccaaggcttttctggaatggcagctcagattagttttggctgtttatgatagtcactgcaactgcctcctattagtgctgacttggctacttcccaagggggaggagtatttgtttttggtggtgggctggggaggtggatgtggaagggcactttattggggtgagagcattgtcctttttgaatagattattaatagagccttggatgatgagagaggcaaggaagaaggcagcagatggagccaaggctgaaggagctgggagcaggagtgatgaactgagagcagctgttgagagacagccagaagcaggggcctcagctctgggccatggggcagagcatgggtttgcaggcaggtggaccagttttgaggagcaatcccccagcatcctgcctccccacccctcgcttgacttggctgcctgtgagaagctagttttgttttgcttaggactgtccggtggtaagctgccacgctttctggagaatctgaacaatatgtcttttttgagaccttctagatcactggtctttgactggggcaggcataagtgggtgcttggcaggataccctggagagctttctccaggctcccatgctcgaaccccaccttggaccaactaattttgggttctcaggaagaagtcctggagcatatacctcagacaggctgttcaggtggttttgtggtacacttctggatagaaccactgctctagctcaggcccccttagaccaggttttggaaaacacatctctagggagtttactacctatccagaagcctgttccatctttggttttgatattgtgccttccataggacatgccaaatctctcagctatgtgggtccttcagctattgaagccagcctccagggttatgctccagcctaaatatccacgatgtttcttgattaatagttattaaaccaacctatgaattagtccaagttgaggatggggtaagagagaggagaacagaaagatgacattaaaaaaaaactcttactgtcaggatagaacaggatgtggcacaataaaagtccttaaaagtatattgatactgtctttttttttctcctgattataaaaacgatacttgttccctatgcaaacagtgaaaacccataaaggaaaattaaacccctagtaatcccacctaccagatatgaccattgttagtatttttgtgggtgtctttctcattaaactcacattactcattaaatttacagctttgtaaacttctttttctctaacaatatcaagatatttttggactttattaatattaactgatgttatcattattatttttttgagacagtgtcttgctctgttgctgcaactgcctcctgttagtgctgacttggccacttcccaagagggaggaacagtaacacacaatcacagttcactgcagctttgacctcccaggctcaagtgatcctcctacctcagcctcctcagtagctggggctacaggctcatgccaccatgccctgctattttaaaaattttttgtagagatggtgtctccctttgttgtccaggctggtctcaaactcctgggctcaagtgatgccttccaaagtgctggattacaggtgtgagccactgcacctggcccatgccatcattattaaaagctgccaactcttagtccctgattattggacattgagcctcaatggtggacattcttcaggaactctgaattcttcttcttcttcttcttctttttttttgagatggagtcttggctctgtcacccaggctgcagtgcagtggtgcgatcttggctcactgcaactccacctcctggtttcaagtgactctcctgcctcagcctcctgagtagctaggattataagcatgcaccaccacgtagggctaatttttgtatttttagtagagacagggtttcaccatgttggccaggctgttctcaaactcctgacctcaagtgatctgcctgcctgtgcctcccaaagtgctggcattacaggcgtgagccaccgtgcccagctgtgaattctttttaaccaagaagattgaatttagcccctcgccatagtctgacatccccatgaggcctgaccctggcccatgcctacctgccctgctggtggccaggtcagattggtctcagcagcttttgtgtcaggttggtttggaccttgatctgtagccatctaagaactgctcagctccttcctggacctgagatagaacttcttgagcttgaggtcccataactgttctcctccactgagcatcaccaatgatgtgggcaaggaggttccctgtggggaccagctcttcagatctacctagcaccagaacggttaaaactcatgaagtaccgctgagcttctgtgtttggtagaggcagtgctgaacttgtcctgtgaccttgggaaagggaccaactctgagtctccatttttccctctgtaaaatggagataatagctcctctctatcctgcctcacagagtcagaaggatcaaacgagatgatgtgggtaaaaagctttgtaaaccacagtgcatcaggcaaacccatgctatacttgataatggacctcccgatagagcccagaaaaaaaatgctgactcaagtctcacttgttctcccagacagagtggactcattggctgcatgagctttggggtgaagtctctcctgactccagacaaggtgggtcctagggatgcttctgtcaggatcatcccaactgggccggggctggtacaggcagagtttctctgtcagctcttgggcagggcttctctctgtgagatggtgccccactgagacaggtgccctgtggggtggcctgcatagcagcactgtgtttattacctgcctagctgagagtttgggtccccttcttggtttgtcttgccagagagcagtttgttaggcagccccaagtcttcccaggaggctctgagtctggtgtctgctgttgaagacattggcagatcccttggggcccagagcactcctgggcctgccccagaagatgagggccaggtgcacccgtggtccgttccaggggtcctcttcatgtgtctaccaggcctgatatttctgggcctaacaggtgctcaaggatggagtgagcagcaccatcctctgtggagctttccttcaggctggaggaggactctttgggacccaagactcctagctctgggtcactggtcccttatcaatttctacgctgcactggactccccaaactggaaggtggagggtggggagcactccttttgcacatccctggaaatgtcctggtggcttgtggcatggcctgccacgcagatttttgtcctggggtgggtggctgaggaccctttatcctgcatgtgagtcctaaagagcttctctctctctctctcttttttttttcttttgagacggagtctcactctgttgcccaggctggaatgcagtgttgtgatcttggctcgctgcaacctccgcctcccaggttcaagcaattctcctgcctcagcctcctgagtagctgggattataggcatctgccaccacgcctggctaatttttgtatttttagtagagatggggtttcaccatgttggccaggctggtctcaaactcctgacctcaggtgatccacccgtctcggcctcccaaagtgctgggattacaggtgtgagccaccgcgcccggtctagagcttctcttgactgcagccttggcttcattctcctagaaaagatgttccccctggagactgctcaggagccacaggatgccttttggtctctccatccctctttcactccttcacttctgttctgtcaacaaatatggctcctactgtataccaggcatagtgtgaggcacatcaaagagcctgtgcacaacttagtgggggagacaggcaagtagatggttgtcctccagggataagaggctgtgggaatttggcagaggggagagccagatctgccctgagcatcacggaaggcttcctggaggtgcaggcatggcagctcggggccaggaaggctggagagtctgtctctcctgtgggtgggtgtccagtggctacttttggagggggattggtggctgcctgacctgtgcttctgcctcctgtgtctgagcgtgccattccttctctcgtgacaggagatcagtggttggtactacctcctaggggagcacctgggccggaccaagcacttgaaggtggccaggcggcgactgcggccgctgagaggtacctgcacacccccttcagcttcccttcccaggacctgccccctccctcctttcctgcatagcggcatcagtactggtatttggtggcccctgctactgagaatgctatcagcctgctgggtgcagggacttctcaggagcacttgctagagtgcaggctgcaggaagcctcttgcccatgcctccactgtttatctggttggacttttactgtagaggctatggtctgaccccatgtggtttagctccctcccttgtggggtactttatgcttccccagtggccccttcccagctccatgtctcagggatcccccaggctgccttgctcatcttgggatacccacctctacagacagggcgtttaggtcctgccatgatccctaaggctcagaatgtggatttcatgacccttttccatgttctgcctttcccacatgcagccctggctcctgagtccctgtctggattgagcctcaggtgtccccacatcctgaggccaggagtggccctgggcagccccatgggcctgtttcccagtgctgtcctctgggtggtccgaggaggggagacttctctgccaccagaagttttctgattctgctctgtcaccttccagacccgctgctgagaatgccaggaggtggggacactgagaatgggaagaaactaaaggtaggtggggacaagctagggcattgctccaggagctggatctgctccttgacagcccctgggcccgggaaacccctaaaggggcagcatttggtgcttgaaactcagcaagtcatgtactcagaaggaataatttcttgattttcctgaggtgtattacaggaaataaatgctcttctcagggtatccatgatcgtggcaggggtggggaaatggccaggcccccacctctggaaatggaagcatctggatcttactaactttgggcctctagaaaccgagtcctccccttcccacagacttctcggccccctgcttcccctgggactgaggccgaatcaccctcccaggttaggcctgcttgatgtcagggggcagctgcgattctgaacctgagaccaaggtgttctaactctattagggcttcaagtctggaaaggagcctttttcatataaggagttgggagaattctccaaaagtcattccatctctttgcagggcatggcaggggatctacggttttctttaacaagtaagagagggaattacttggccaggtgtggtggcccacgcttgtgatcccagcactttgggaggccgaggtgggcggatcacctgaggtaaggagttcaagaccagcctggccaacacggtgaaaccttgtctctactaaaaatacaaaaaaattaactagacatggtgctgggcgtctgtagtcccagctacttgggaggctgaggcaggagaatcacttgaacccaggcagcggaggttgcagtgagctgagatcatgccactgcactccagcctgggtgacagagcaagactctgtctcaattgaaaaaaaaaaaaaaaaaaaaaaggaccgggcacggtggctgatgcctgtaataccagcactttgaaaggctgaggtgggcagatcacttgaggtcaagagttcgagaccagcctggctaatatggtgaaaccatgtctctactaaaaatacaaaaattagccaggcatggtggtgtgcacctgtagtcccagctacttgggaggctgaggcagaagaatcgcttgaacctgggaggtggaggttgcagtgagcggagattgtaccgctgcattccagcctaggcaagagaacgagattccatctcaaaaaaaaaaaaaaaaaaaaaggagaaacaaactcccagcaattcattagcccctgtataccaggtgctgttacctaatcttcactgcccgctctaaggcagctgttacttccgcatctcacagatgagagggacatacatggttcagagcattaggccctctctgtggccacacagctggcaggtggtgaaggcaggctctgagtgagggctggccaccttttcagtgtgctgtggcacactgcctcctgtgcatggcctagctgggaatataagacattgctgtagttcctaatagtattttacgtattacacaatatcggcgtattacaatctaccaaacattttcacgttcactgactcaagtcattcactcattcatcattcattaaatatttccacctatgtaggctgggccctgtgctgggtgctgggatgcagctctggacctgtctaaggccctgccccatggagcagtctagagctgtgctggccagtgtggtgaccacctgctacctgtggctattgagcacttagtggctagtgtgactggggaactgagtgtcaactttagttttaagtaatttcagtttacctggcacatgtgtctagctgcgactgggttagacagagaaacttgccaggagtaacttgtcaggtttgttttctgtggtttcattagttgaaaagctttcctctggcttctgtggggaactgcaaagacctttcctcctctctttctacttgccaagcacagagaggatggtgatcagggggcctccctcgtgattcatggaaattacatgggcatcaacaccgtaagtttgcttcctccaacatcacaggtttcttggtggcttgtaaagtcctcctgcgtgctggattctgcacacaggccctgagccccttgttctgaggtgcactggattttcctgaacttatgtgctcagagatgtctgtgggactcagcaaagagggtgtgcttctcagaggcttggttggggccgggggagagcccccagaggccatctcttcagctcctgtgctgtgcaggtggggagatggaggcccagaaacctgggtgacctgcccacagtcacacagcaaccaaagctgggttgaaccaaggaaccctctgtcatcaaggacttgagtgtgtggctgggcttccccaggggctctgagatgggcaaaagcagctgggctcaccatgcgctgctctgcaggatgctatcctgggactgccaggcaagaaataggacccaggttctggtcctagccccacactgccctgctgtttgaccataacctctccaggcctcagtttgtttgtcagtaagatgaggacgctgggttgtctgatgacctggaaatcccttccacatttgactttatggtccatgtgtatcaccagatcctgacagcaaaccacttccatggacaaaggacaaataaattgacttttttttttttttttttgagacagactctttctctgtcacccaggctggagtaccgtggcatgatctcagctcactgcaacctctgcctcctgggttcaagtgattctcctgccttagcctcccaagtagctaggactacaggcgcctgccaccacgcccagctaatttttgtattttttaagtagagacaaggttttaccatgttgaccaggctggtcttgaactcctgaccccaagtgatccatctgccttggcctcccaaagtgttgagattataggcatgagccaccacgcctggccgaaactgacttttaagtagtttccaagtggcaggcaggtcttcagactccaaatgttttatgttccctgtcatgagatgggatgtctgtgagtgcaaacccccccaaggtatccttggattctttaggctggggcagtctcctggatttctagcagggtccctgggacttgcagggggaggaggtgttgttatagagcagccacgttttctgcctgggttctcctccagtgaggggtgtttgtgagaacattggaatcacaaagtggcccatggcggagaatgcagccagaacaaaggcgccctctccccgccgggcccggggaatactaactagttgacaggaattttaatataaaactctccctcttccttgtcattctgaggtttcaggaagccttcgggcttatcgtgcagaggcacacagcacagacagggcttggggaggtgagaggtgatttcctgccattcttctgtggggcgggcttcccagggtgctcatgccaggctgacgggtccagtgcgggctcccgctgctgggggagagctgggttttcatggggcggcagccgaggcaggacccgcagccatgaaccgcttcaatgggctctgcaaggtgtgctcggagcgccgctaccgccaggtgggtgcttggcctcttgtggggagcctgtggggtgttcagggataggggtagagggaccatctgagaaggatctcgctcctcacaaggtcttctttgacctttcctgctccctgcaggctcacttggatatggggaggaggatagagacaggagctggacccaaggcccctttagggcccagctctgtatggagtcctaaccactggctgggtggtgtttttggtgagataatccagctagctttctgttctttttatctggggaggggctgtgggtgtgagattgaaaatgccatggttgctgagcagctgggagcagagtttgtatttttgctaacttttcctgcttctgacaggacagcagtgcccattctgccccctgtgcgtgtatgttggcacgtgctcatatgtgagatcgggtgttttcgtgtatatgtacatatgtataactttcctctcccctactgctgatgcctcactatggctcaggattcctttggctttggaatccaactttacagtgagggtttggcctcttagcctccggtcttagaaagggggaagactgggccattatgatcccattagctcccctgagcctcttctagaactgtgatgggccattttttctcataaaataggaatggggttagggatggtgaaggcaagtgatatctaatctggaagggagttctgaaattgtcctgattttaaaaaatcacatagagaagcccctctatttgttttaatgaccagattggactgtgggtcttgactcctctgactggcagtgcttaggtcccagggagatgcccagaggggtccctgcccccccacctgcctgctaggggatccagtgttttctctctagccctcccccgctctcaggttctgcccttcaggccccactctgtgtttcctgccctcatggggctgggaaaagcagcccctgcgacactagcgtctggatggcagagtggtgagacagagagagcactggttgggacatctagtagtccttggtcaccctggggctatgggctagaagactgggcatgctggctgtcagagtggggccaggagcaattgtgggctggacctagggctcagggactcagagttcaagatggtttctgtgttagaaaccagtgcagaattgagagcagcaagctttttgtcaggtctgagctcaaatctagctctgttcctctttagctgtggcttttgagcaagtcactgttcctctctgagcctttatctcctagtcagtaaaataggataatgaaatccagcgatggtgccatgggagtgaataggatgatgtgtgtgaagagcctggctcagtgtctgctgtgcatatttatctaggaggtgtttaatacatggcagaatttggggattacagtctaggcaggacagaggaacagaaactagacaggagagcagaggtaaggggctggcatgggtgagacctgggagcagtggctgttcctgccctggacaggaaagagcgagaaccacccgcaggaaggacaggctctgtcagaagccgccaaggcctcggggcagggctgctcctttcacctccaggtcagagcagggctgagagccggagggtggagggggtggcacttcgagtcttatctccttgtctgtaaaatgggcatactcattcccctaggggctgcagggatggtcaggttctttggacactaccctctcaatgtggtcagtgatcatggtggacagagtgtaattctgcttcctccgagctaggaggtgagcttgcctcccggcaccctctcctcttcccctccttcacactcccatctggcttggactgtggtctgggctggcacttcttaagctggtgcccaggagggtgaggggcccccagcccacagtcctgcttggatgtggggtctgggtgtgggaggaggaggctgttttcttggagcacactcctccccagaccccactctccagttactgccccataactggccatccagagcccagggtgctgggatgggttttctatgcagggggctttggccctggatggggtaggggtggggaagtgctggataggctttgggaccccagcttgtgcttgggttgagggttggcttgtgaggcccctaaaaaatccccgctggttccatggagggggccaggctcctggcgtcttccctggcctcaggcgggcccggcaactagtggctgctcctttcccccagctttccacactcgtacccgcgtttgtttttctttctttctttccatttttttctcttcctgtcttagctgcgtgttttcccagaattcttatgggaacggggtattttcctgcctcctcccccttccccttgtctgtcaggtttcctgttttacaaacttgctttgaatccaggcccggggctggtgggaagcagagcctcagaggtccctgcagcttccaaggcccttggtcactctgagccccctcccactcaccttccttatgcctggccctgggatggtgggtaggtgaatgagtgcaggtgcctagtcttgcagggacaaccctcaaaggaaggagacagaagtctcctgacaaggcttgtgcccttgaccttttccaagcttgctgagctggcctttgtctcaactcacttgggacacccttccctgtgcctcaccagggcccaccccaagtcccagtttctctagggggtctctcgggaccccttgaatcccttttctgatttgtgctgcctttagcagccggaatgggctggcagaccaccctacatcctcctgtgtgtgggacactgccaggctgtcctccctgcattagcctctgctgagttcctaccatgtgccaagcatggcgtccatagtcggagcataaaggactgagaatggcccagtcctcctgcttttctttagtgcccgctgtgccctgcttcactctggagaggtttgtgtaccctcgtgctcctctgggaaccagagaccaaggctgcatgcctctgtatgtccacagagcctggcatgctgtaggagctcaataattgtgtgccagtttgaaaagagcatccagatggcaaggccctctcatggacttctgaaagtaggagttgtggacctgtcaagcacatgggcctcagcaggcacatgagtcagtggctagttcaggttcagccaggaagcctatctgtgaccttacctgggagtcctcatgggatgccttggggccctggccacagattggcccccagaacctcagctctcttcctctgacccttggcctgagatggagtgagtgtgtcccagtgtttcctcccctgtgctctgggagggcagtgaccaggctggccttgactttgggcccttagcacagggcccgccccaggctaacgctctgtgaacctctgtgagaaaggaagaagggagccaggaaaacagtggatcaaaggtgaggctgagtcatgcagtgctggtgggcccttggatcaagggctggggctgctggggctcaggatggcaaagtttgcttttccaagaccttgtccatcccaggccctccccacatcagcctgggtttacttgctgagctttgggccttcctgcttggcccacaacccagtgctcaagttgtctgggctgagatagggacactgaggggctggctagctcctttgtgcctccagttcccttggagaggagggtggctcttggcaggggtgggctgtgggcttcctgaccttggggtagaggcaagagcctccagcttctggcagtgaccgggcagggctgtgtcctagatcaccatcccgaggggaaaggacggctttggcttcaccatctgctgcgactctccagttcgagtccaggccgtggattccggtaagttattgacagggggatgccaaccccacttgcccaccacacatgtgggctttgcaaacatagtctggaactaaaaggggagccccaaactggagcaaagtgtcctggcttttcaaaatgaaaagaataatatttttaagtgaccgtagatgaaactgccatttatgaaaatatgcccactttttttttgttgtttttatcaaaatgaaaataggtttttatattttgtttcccaatcagtttgaacaggaactaaacctatattttcagcaatggctgcaagggaaaatgagagtcatttgtgaactctatttgaagctgttttgtatcctatccagagcctgatcagcacttaaaaagagccatccttccctacttttcacaaatgaagatttctcttaatcacagagtgagcatctcaaagacagaagccagggctcagtggtcagggtgtttccagtgcctacacaagggtgggcatgaggttcgtgcacaatgattggcagagaaggaataaatgtagtgtgggagcctggccccagggaaggttctcaatggggtaggaggccctggggaggggtaagggcccgggtagaagggtggactgcagagaggtaagccagcagtaggggaggtaagccagcagtaggggaggcaagcagggagaagggaaggcaaagggatgccttctttcaaggctcttgagaggcaccaagttcagtccctcatttcacggatgaagaaacttagagaaaaagggaggtccttgtctgaggtcaccatggcagcaaaggactccagatcctttgaaggggtcttaggcttcaggggcccctgaatggcttttctttgtccctgcagggggtccggcggaacgggcagggctgcagcagctggacacggtgctgcagctgaatgagaggcctgtggagcactggaaatgtgtggagctggcccacgagatccggtgacaggggacagcgggtggcctggggcctcaggctgatggcacaccctccccacccctgggcacactgccttgcctggcccagctcttgctgctccctcttttgcctagctgtgagcaggcaattccttttgctcttcaaggaatctgtttcttggcctgagaatggaaggttcaggctcagagcacttttggattccagagcaaacagcagggaagatgctctcagactctgtggttcaggacggggcaccaggaggttgctttctgctttagctaatttttgttacctaagagctaagcccatttgttatttaagggcatgaagatgttgcaaatgtttcaattgcacaattaaaaaaatattcttgaaaacattggagtctcccaaattttgatcctctagggtaaaaccccgatggccccattttaggtctgcttctggaataaccagatgagggcttgcacttaggtgacctgctagctttacttgcttatatcttgcttttgataagcatcatggattgagtatggaactctttcctgttgaaactggcctggcctcagggtccttctcaaccactgcccgtcaataggaattgacctaggtgacccatttgctgtctcttctttaaatggcttcttgcatcccttcctgccctgacactgggggcttcccctctggtgtctgcctcctcttcccccattatcctctctgccctgtgggccctcactctggctgatactggctttccccaggctcaacctgtctgtgtgatcccccaccttccaggagctgccccagtgagatcatcctactcgtgtggcgcatggtcccccaggtcaagccaggaccagatggcggggtcctgcggcgggcctcctgcaagtcgacacatgacctccagtcaccccccaacaaacgggagaagaactgcacccatggggtccaggcacggcctgagcagcgccacagctgccacctggtatgtgacagctctgatgggctgctgctcggcggctgggagcgctacaccgaggtggccaagcgcgggggccagcacaccctgcctgcactgtcccgtgccactgcccccaccgaccccaactacatcatcctggccccgctgaatcctgggagccaggtacggacagctggtgtggggaaggtgaagggtactgggtccctgtgggaggccaggaagacttgaagacccaaagttgtgtgatgagcagcctgtgaggggctgcgatgttgggcaaggagatggggtatgtgctagctctgccttctgcaaggctgttcttggtagggaggacagatgggtctatgtggcctcagggcacagattcaagaccagggcatgcacaggctggaagatttcaactcacagaaggaagagctttctactagcctgtgcttttccccagtggaatgggctgccttggtaggtggtgagcccccatcataggaggtatgaaagcagacactgcatgattgcatggtgggatgatggagtgcgctccccaaaacattagtcccatgagatgctctgggaaaaaggtgttctgaggtcaaataagcttgcgacatatcccataccctcttcctcatctaggagattctcaatgcaaaggagcctagtagaggctctgctggcatcctgtactacagcaggtgtcaaccaaataacaccgcatttcccaaacttgcctaatgggggcacactttagggcgtggttggtaccgtcttaccattccagtgttccctagaatgcactttggaaccagctgctgtaaaggaagttggggacttgccaaggggttaggcttcatgacccataaagcctctttcaacttgaatattctgggattttgtgttctctcccagcctcctccctcagctggttaccagaactgctgtttttctcttgtgccctgaggtgctccacttcctctcccctggggcccccgtgtccagcagcctcctgggctgtcctgccctgttcctggggctgaggtggttttcctgtctttcccttgcagctgctccggcctgtgtaccaggaggataccatccccgaaggtgagtctcctgctgctgctgtgccctcctagctcagagaggcagcaggggtcagctgaggcctggcccagcctccgcccctgagttctgaggcctttccaatggagtcaggtcacttagcctatcgacacagactctctttccacgtggtaccttttctccctcacggaaccaatgtctttcttccttgaagccagaactgagaaggaggagaggggatcttaccagggcattttgagagaccgtgtgtccaggcctcaggcattcaattgagattcatccaattttacagagcaaccgatatatattaggtgccagaggcaatgtggttgggcttgcatggaagggagtcagggagcgtggaggtgggaggtcttgagttggagttctagctatatgactttgagcaaatcatgtctccttggtcgggcgtggtggctcattcctgtaatcccagcactttggcaggctgaggtgggtggatcacgaggtcaggagattgagaccatcctggctaacacagtgaaaccccgtctctactaaaaatacaaaatcactactgggcgtggtggtgtgcgccaatagtcccagctactcaggaggctgaggcaggagaatcacttgaacctgggaggcagaggttgcaatgagccgagatcatgccactgcactctagcctgggtgacagagcgagactctgtctaaaaaaaaaaaaaaatcctgtcccctcgctgagcctcagtttcttcatttataaaatggggtcaataattcctacctcagagggttgttggggggatcccatgagagaatggttatgagtagttgcctgtatactgagagaggctatacagagggtagctgtctttgaagtgcacagatgtctctgctgctggatggattcttcttctttggcttttaaaatcctgatcaggggtggaagctgagctcaaaaccactttcttctcccaggaaggctgagatattggtcttgaggctgaagctggctgggcattccttgagatccttcgcgtgcctgccagaaagctttgactcagaagtccatctggtgtctggaccgccttccttgacagtggcttttgcttagccactcacagacttgcttccttgctgttcccctctcagtggtgtgaaggcgatgcttctagggggtagttggaaaagtgcttgtgccttttgcgggtgtgaagcgctcccatcaggctcagggatgctgatggaagacatcttctttctctccggtctggggcatttgggcagttgagcctggtcagttggaaataaatctgtgttccttctggggagaagtccgacagcaattcaatgatgagttttatttttattttttatttttccatagattattggggtacaagtggtatttggttacgtaagatttttagtggtgatttgtgagattttggtgcacccataacccgagcagaatatactgcaccccattcgtagtcttttatctctcacccccctcccatccttcccccgaagtctgcaaagtccatggtatcattcttatgcctttgcgtcctcatagcttagctcccatgtatcgttgagaacatacaatgtttggttttccattcctgagttacttcacttagaaaaatagtctccaatctcatccaggtcgctgcaaatgccgttaattcattcccttttatggctgagtagtattccatcaatgatgagtttttaaaaagcttttggttggcacattaggttagagtggagatgctgcagctaagtagggacttcattagggtcaaggcctgggcctggcttatttctgtaggtccagtgcaggacccagggcctggcggatggcagatactcagtagaattttggttgtgtgactgactgaaggagaacgacttgggttgcctctgaggctttggagtctggtcgtggaggaggggggctggagaagtgtgctgcctggagtgggcccatgcacacaggctggtgtctggggttgattccttctcagttgagaggtacttctgtgtctcccttctgtgctcccagcctgtatccatgtttcattcccctctgagagtataatacatagtaagtcagcaagagcacagttatctaagccatggggaaagggacaagtgaggaaatgatgatgatattaataaccatgctagctctttgaatgcattgtattaagatcctgaccttactttatgtattcttcataataataaatcttcactctttaccagggatcaagtctttgtagctcacaattttaggattcagaggaaagggtgaaattcagggcacacaatttcccttaaacacacttgggattgtccagaggttaaggctgtcaccagggtgctggcttcttagtccccctcctctggctgggctgccaagagatagcccttcaggagtgttgggtcatcctgagttgaataggagggagagttaagccatcctgagttgaatagggtctggtgcccttccggagcccagagtgcctgcccggctgtggttggcatgtttcccagggctgctggtgcccttggcattgtccctgccctgtaaaggtgacctggcctcagattcgccactgccagggcagggtggctgccagggctcgcctcagaatctgggagcaaagccctgtaattactgtatttggtcggtgaagcaggtgttggaggagaaaagggtgatatgggggtttggaccagacatcggtagcaggtgggaagtaaatgagtttgccttcacagagctcagtaactgggttgcaagctgtactgttctaaaaaaaaaaaaaaatcagttttacagagccactcccactagccacatattatccaggggtgggtggagattgggcacaagggcatgactgctgcataggttgggttaatcctgccttgtataatttactagccaaatgaccagtcaccctaccattccagacctcagtttccttgtctacaaaatggggctgagccgacttttcctctctgaaggcagaattatgtgttgggtacttcaggtgaggcccttggtgaggattctgtgacagccctgggcccctgggctagagaagggaagaaatcaattttttaagaagtccgagactgggggcccaggacccagattttggcatttacagttggtacccatctttacttttggtctattttgttccagtcatctgcttgtcagtcctgcatggttttgccttctctgctgtaggcttaaccatgttaaattagactgtctagatccaggctggccatggggtttcattcacagcatggtttgagaccgagcagccctgcctatccttctactaaccctggtaggtggattacttggaggcttaggatttgtgataatcccctgactactcacactgtggtacaatccaccaagctcttttccatcaggtctcttgtgtgaacctcccactggccctggggcaagcgaggcagcaatcagtattatctccacttcaaagtggagaaaactttgattcagagaaggaaggaagctgttcagggttacacagactgtctctgacttgggaagtcagtgatcaagctcgggtgtcttatccaactcaaattcagtgatgatcttgagactgaggatggtgctttaaacaaagggtccagggcctggcagcacacatccctctgggactgatatgtagggccagatcagacaaggagctatgtgacatcttccttgtatctgttcctcctgtgcccatccagggctcatgctcattctactcctctctccgtgactcacagaagaggcaggaagtggtttgagttatcatggtttgagcgctgcccccagatttgtctatgatcagtggtcacttgtcaggggcacggggggagtcaacttgtttttcttaccttgcttggtgagaaggggctgggggtgggaggaggaagcaagtgtgaaaccttctgaggtgagttttatctccgaggctgtgggtgcgcgttggtggggagcttccctgaggtatagctggggtcaggccacctgttcccccctcgctgccagggctgctggcagcagaagacagcctgcacccaggacccaggctgggcacccaggtcagtgaggacctggtagttgcccatacagtagcaggaatgccttagaaggggcccaggagtgtgtggagcctgactgctttggagtttccctcccacctgcttggtccaggaacccctgactttttagcgactttgtgttttgtccctctgcctactagacggaatgtaacaaaaacctgtgcacaggctgggcatggtggctcatgcctgtaatcccagcactttgggaggctgaggcgggcggatcacctgaggttgggagttcgagaccagcctgaccaacatggagaaactgtgtctctactaaaaatacaaaattagccgggcgtggtggtgcatgcctgtaatcccagctacttgggggactgaggcaggagaatcacttgaacctgggaggtgggggttgtggtgagccgagatcggccactgcactccagcctgagcaataagagggaaactccgtctcaaacaaacaaacaaaaaaacaacaacaaaaacgtgtgcaccaccccttgttcagggtgaggggtgtgtgtccatcagtgtccccttaaagagggacccctccccccacaccgccgttgcagcctctgctgtccttcctgggggtggtcttgtttctctgtttctctctctctctccttatgattagaatgatttgtgagttggtggccaagccggagtacctcctgggtacagtgaagcctgggattcccagagtcctatggggcacctgactcccaaacttgcttttccaagtggagaaatcacaacaacgaaacaacactgagtttgcagctaacttttatcacacacttactaggtcccaggcactgttctaaagactctaagtgaacttagagtatttcatttaatcttcactgtaacccagtgagcttggcactattgttacagttgaggaaatcaagactctgagggtgaaataagttgcccaagctcactgagctggtaagcaggggagcaggatttgagcacagccacctggctttgaagcttgtgcgctttcctgtgacctggggcagcaagtgccactccttattctagactgactggagtgggccaggctgctctagctcccttggctacagagggaggactccagtacatcctgggaaagcctttggtctccgctgccactgctgcagagagtggatttttgtctgtggggcagggagggaggaaacagattgggctgggctgagcttgtgcagggagtagtgggaatggtgtgggggtctgttaaggagagcgcgtaccctgccacacaggctggtcaccactctgctccaactgattgttccacgtgggactgtgggctcagtgaggacagatcttctgatttttcaaatatgagcgatttcttgatttttaaaagactgaggccaaaatggaaattctgatccggggcctgggtcagcaggtggagtgtgctgcctccatcatagctggtggtgcccagcgctgtgctagccctggacttgcttgctcacgtgtcaacgtctctcactagagtgcgagggaattccttgaagcccgagcccatgtgaagcctccctgtgtttcagcatcgtgcgcagggcctggcacaaagtagctgctcagaaagtggttgttgacggaatgagtccgtgtcccctgtttctacagaggggacacctttgcaggagtgacggaaatgtctcatagtcccccatctctgtttcacagaatcagggagtcccagtaaagggaagtcctacacaggcctggggaagaagtcccggctgatgaagacagtgcagaccatgaagggccacgggaactaccaaaactgcccggttgtgaggccgcatgccacgcactcaagctatggcacctacgtcaccctggcccccaaagtcctggtgttccctgtctttgttcaggtgagcccgtggctggtcttaaaggttccctcaggaggaacggagaaagaggagggcccttgccccaggactcagggatgatgacttatcccaggactgagggccctgttttgggaaagataagtagctttagatgcataggattctaggggcttatactgagggagcagagatttccagggagatacacaggaaaaagtgaggccgggatagcccagtaaggaaagggtcctctccttcccccacctcgcctcccctttctctggggaaagggcaggtgcaccccagctgcttgttgccatgtcacagggactgtttgccaaagctcccgctccctggctcacccagtggttttttatttgaaaataactgagggagacccttggggtctgtgccttatctgctctccctggtctctgcaaacaagtttggcctgtattcactggtggcctgcgattcactagatcgctcttattctccaacgtcaaacaaagtgcttgaagaaagataatgaaacaaacagcaagctgggcctgaaatcccagctacttgggaggctgagatggaaggatcgtttgaggccaggagttcgaggttacaatgagctgtgatcataaccctgcactccagcctcttcttcttcccccttttcctccccatttatctctccttctctttaaaaataacctttattgggccaggtgtggtggctcacgcctgtaatcccagcactttgggaggcctaggtggtggatcacttgaggtcaggagttcaagaccagcctggtcaagataaaaaccccatctctactaaaaatacaaaaaaattagctgggtgcggtggcaggcgcctgtaatcccagctattcgggaggctgaggcaggagaatcgcttgaacctggggggtggaggttgcagtgagccgagatcacaccactgcactccagcctgggagacagagtgagactctgtctcaaaaaaaaaagaaacaaaacaaaaacctaaaaatctttatttattccatcacccagatatgatagtgtgaacatttcagcatcttttctgtgtgcatatgcacattaaaaaacagaccttattctatattttatatcatgttgcctttttaaaaggaaaattgtagcatgaacctttcccacaccactaaatgctctgtgttttacggtggttgcccactcttcttttatatgggtatactgtatttatttaaccagttctgtattcagatacttctgtctactcttttgctattgtaaataaccctgtgatgaaaatccttgcgcatggattgcctctctgattattttccttgggagagattgctgaaagggaaatgactgggtcatgggtcataaacattttaaaggctctttacacatattgacaaattgctttgcaggaagattctaatggtttatcgtcttatcagcagcatagacatgacttggccccacgggcttcatttctgcctgtgcctctctggtctccctggcatcccagtctgagcctgtcactgtccagtaggcacactttgttaggatgcaacacatctctgggagctcacacgcctccccttagacagctctgtcagcagggcctggccttagcctttctgtgggtctcttctctttcttagcatgtgacacaaagttcttggcatctacaatgtctaattttctttctttttctttttttttttttgagatggagtttcactctttttgcccaggccggagtgcaagggtgcgatctcggctcactgcaacctccacctcccaggttcaagcaattctcctgccttagcctcccaagtagctgggattacaggtgcccacgaccatgcctggctagttttttgtatttttagtagagacggggttttaccatgttggccaggctggtctcgaactcctgacctcaggtgatccacccgcctcggccttccaaagtgctgggattacaggcatgagccaccacatgcggcctgtgtctaattttcatgttcattttaatatttgtataagaaactacttctatttaagagacagtctctcgctgtgtcccccaggctggagtgcagtggtatgatcacagctcactgtaacctcaagctcctggcctcaaatgatccttccacctcagcctcccaagtagctgggatttcaggtccagcttgctatttgtttcatgatctttctttaagcaccttgcttgatgtcatgtacttagaagccatattagaaatatacagtcataaggacaagtcctgctgggtaatccagagcttagggagcttcctctgggctgggctgggcaaggtgagggagtagggtgagaggtttgggtgataattgacccttgggggattgcctgagaaggagacagttcaagtgtgctatgagtgcagagcagggactggcctggctttgaagggactcaagtgaccaaatctcttggcatgtggctctcaggatgcctcttggtcctgtgaggcatgaacaggatagatgggggatggcgggggctgggagggcccaggagcccagtgcagtggggggtgagagctggggctgaggactgcagagggcctaagcctgtggttagacttcctgtcaatgagtgtagctctcacggtgagggttgatggggaaggtggcagcaacagttccacaggacagcagcgtctctctttctgtttccatcttatgtatgagggggtgtgtgggttctcgggtcggtggcgggctgacagtcttctctgggtcagagggttctctgtggctggctttgacaagctgctgcttcctccccccgggtcctcacccagcctctttttgaactgcccactcagcctgctttatttccagcctctagatctctgtaatcctgcccggaccctcctgctgtcagaggagctgctgctgtatgaagggaggaacaaggctgccgaggtaagactttcacctgcattttttagggggctttctgggtgggcttcattggcattctccaggcccctcactttggtctcttcctgagtatcttagaattgtacattctcagggtaggggagacctgagaaggaccccgccactctccctagcaaaggctacccagctttttcttgtacatctcctttcaaaagctgtcgaatccttctttgatggttagaaagtttccccagcccctaaagacaccccattgtttatcccaccttcctctcaggagcagaagagatggcaatttaccctggctgtggggagtgactttggtggcaggaagagtaaagctattagccaaagtgaatttttagaccagcatcagtttacctgagttttctgggcctgttttaacccaaatcccatgtcctcttctgagagacgagtctatgatttcgcctgggttgtagctctgcctgtggggtgctgacatgggacctgtgtcacccttcctgggagctggcctgggatgcttttctctaattgggagaacttcattcatctacacaaccccagagctggtcagttcagtctctgagcttaaactacttgggtacagaagttggagccctgggctctgccctggctacctggggccatggggtgagggtagcaggctctttgcagatcaggccccaatgtagagctgccttggctgagtcgagtggcagcttggggtagtggaaagatcaggaaacttggagacaggaagtttgtatcgagacccaggtctgctgctggctcacatgtgatttcttccttcttcctcagtctttccatctgagcagtaggtatgtgtgtatttgaggcagtaagggcagggtcagaggttggtctgtaaggacgctttaaacctcagccttctgggacactatgtgtgactgtggctgaagcaggaggttggtttgttttttaagtaagcagactggactggaactcatctattccaaatgtacattatctttttcaagggagtgccctgggggactgcatgctcccttccaccgctcgctgttgcctactgtatttctggacctcctcttttccgaacctcctcttgggaactttgcaaactttgggaacttaacaatctttgcatatcttctgaattgtctcagtgggagtaaaacttcatctgttgggagggatttaagttttagggatgagaagtcacttagagctatgtttggtgaatgagagtgtggtggacctaagtctggcatccaagggtcagaaattgaggtgtggccataaattcacagactcataagaagccagttagagatggcagccaccctgaaacatatacataagtctaaattcactcttctgtttgtccacttacccttgaatctgcaaacattgagcacttattgtgtatcctcattgtgtatgcattttacatacttgaccccaattagctcttgcagcacccccatgaaaggcacgattgtccccactctgtagttaaggcaactgaggctccagtgagattcactgggacccaagagtctccaggctggtaaggaatggagccgggtcatttctggctcagtgatgctttccatgaccccacactgcttctggcatgtctgcataaagacaaactaaggaacacaagctgaagccagagccttgtgacagttgcaattcgtccagaaaaccctgccttatagatctctggagacttagaaccaagagacccctctcccttagccttgaagattgaaggaaacaatttgaagacaagtaaaataaatattaatgtattcctttttgttgaagtatgatggcaaccaaacatgtagatctgggcatcctgtcatattactcacaccaaaaaaaaaaaaaaaaaaaaattcaaagggatttggataaattcatgaaatctcagcattggttaggctttcaggagtcatccatgctaattgcttccttgtaactttccagttaaatggttttctgattggtgcttgaatcttctagggcagcccattagagcagtggtttttttttttactgggaagggctaaattgtagagcattctcccttacactcaacagaaatctttatttgtggaatgttcctccttggttctttgtcccatcacttctctgggcatgctcaagtttgctaacatctgtgagctgatccagtcccgcaccgtgaactaccctcatcacagccccttccagaagtaatagacttgattaatgtgccctgaggtctatggccctgtgcgaggttctgggaataccatgaagcacaagacagacacaccctccctttacacactgactcatggagtttaccattaactaaggcaccaaagtctttttggtaaactctgctcttaggtcagattcccaagaagaagcttagttagggccacttgggagaagccaccctccaagtggtaaggacccccttaccaagtgatccctcaactctgaccctttggaaaatcagatgtgtccttggagcaagtgtggggaagacactgggtgacccccgtggcctgtggaaggcgacaggtgattgggccatggagatgggcatcactctcccatgggctgccgtggcccctgctggtgctggtgagatgggggagtccacatgccctccccggcacgcttgcccctctgctctgcctccagctgtgtgccagctctggcctttccctgacccaacctttgggaaatttttcatttatgccttaatcacttcctgtctagaccatattctcagccctgggaatctgagccagagtggtggcctgggccttttctcaccttgctcatggttcttccccagttgctggtggctcctcctacttgccctacttccacccctctctgggcctgggctgttttttttttttttttttttttaaactttctaggctcctgacagattgtcggctccagcccttcccctgccagcctccctctgggtctggaggtgactaccagatttcccttgagtcagcgacacgttttgtgggaccctgagggtttgctttgtgtttctggctagtttagagccttctttccattgctcggactttgaagtcttctcagacaaccaattccttgactccttctgagctcttgagtcattttcttcacctcatctcttaacattattattatcattattattattaattattatttttgcctcatttgctccacctctttggtctctggattctttcacattcaggaactgcacagctgtaagcacattggtatctctctgtatagtgatagctttaggtcagctatacctgggtaatggtccctggctgtgtggccatggacaggtcacttaacctgtctgagctctagggtcctcatctgtaaatgagggcagtggtgttatttataagtgaggatccactgagcagaaaggaagcgttcaacacttgaagacttctcttgggctgcactgagacagggctgtggtgggaagggttagggtcactaccaagatgccttatagcccagggttctggagtcctcatgtttgggccccattggagaagccaaagcccctgagagctccttcaaggacgtctccctgttgtctctgcagcccagatttcctcaagcctctgtatttgtgctacactcaagaagccaagccatattttgatatatattctatatttttaaattacaaaagtaacagtgattgcaaatataatacacattaaatcaaaatgtatcaattaaaatcccactccctggagtgaggagtgtggcatcttaactattttaaaaatgtataactatagagaaatgtgttgttttgttttacaaaattggattctatgctagatatttttgcacattgtactattttgatttacgatagacagatttctatttctgcccacatagctctactttattttttaatagttgcataaaattctgccgtatgaagttagcacaattcattttattcatcttctcttgatgaatgtttgttattttcttaaattacaaaaatgctgctgagaacatcctcatatgttcatatttatacctccttgtaagtatttctgtaggatagagtctcagaagtgaggctgtggggtcatctttaacaggttgatagctgaatgtcaacctgttggctttttaaatgtcaccaacagtccaacacacactcacggtacccttcagtgcatgccaagcccttctggctggttcttcttcagaagagacaaggtgtcaggtgtttgatatctcaaagggaagttcacatacttaataacactttgttttctttggagaatctaaaattggattttattgcttttgactaaaggccactgcaggatttgcaaaacaaagaacagtgtaatctttagtggcattaaaggatcaagtggattttcttagcataaaaatatgctgagcgtgcctgttggtttacctataatgtctaagaatagcctctgcctttatttttggagcagctaatgcatgaaaaagataaaagtgatgtccatgtctgtactagagtgtgagtaactggctgtttcttaaactgatttctcattaatgcaattaaacttatccacaaggaatttgataatattagctcacattgtgtggcgctttactaggtctgcaaaaagctcttggaaggatcctgtaagaatgccaagcagggactcttctccctgtttgggctgttgagaaaactgaaggggttaaggggtttaagccaatatttttgtggctagttggtggcagagctgggataggagcctcctgacttctgactttcaagtccagtgctctttcagccagacacttagagcagaataaaagcaaatatggaaaatcttacagcttaaggattgctccaagccccaggtgctgggctggaggctccaggagcatttggtcagagatgtaggcttcggggatcaggctgtggagaggcttgcagagaccagctgccatggagggtgagggccacttttccccttctgtttgcttttttcctactttgaggagtggaagtataggaagctggagggtgatggggccatcttgactgcaggtcaggactgcccttggctgaggctgtactgagcactgctcctggttttgtgtgagatgatgaggatgcattatctggggaggctgtggctccccaccttctcggggaggttgtggctctcagcctccagaggacagcaaagtagccagttctgtttgctctctgtcaacccaggtgacactgtttgcctattcggacctgctgctcttcaccaaggaggacgagcctggccgctgcgacgtcctgaggaaccccctctacctccagagtgtgaagctgcaggaaggtaagcagatgccgtaggtgcccagagcccctctcaacttgccccagtcccactgctctgggcagccctctgggatctggctgccagtcatccgtagggcactggagtgtgtgctgctgggctctgtccatgggctagtaggtctcagacactggcattctttctaggctggtaagccttctgatatacctgaggttttcagggaagtttctattctagagactttccagagaggctgtggagtcgggtaggaagagctttggattcagacagacctgtgctcaaatcttggccctgtccctccatactgggatgactgtgggcactgtactcagcctctctgagactgtttcctcccgtgtaaatagggataaaaatagtaaccgagaaggttgctgtgaagattaagctaggtcataaatgcaaagtgcctggcccataacaggtgcccaataaatacttgttgccacccactcaccccacagatctgtggacagagaccgcaactcggctctactcagctgcatggccctgcggagcccaagccgctggggctcaggcacatgtgggagcgtggagggaatttctaacccaaactttccaccacgccctccactcgtgggaggggaagccagctgggagtatctgtcagtggtttggtttggcgcctgaggtctctgctgagaggggctcggtttcctctcccagatcatgaaaacaacagacccgtttgaggatgggtgacaggggcagagaggaaaatattacccagtgaaagaattctgttttggtggggtttgctcgggaaagcttcctggctgtttgcaaactgtcctgcctgcttagtgcctgagtgttcctcctcctcggaaacccattcagtatgagaaccgccactctcacttccccacaggaagccactgacaacttctccatctcgggctctggcctttcccctgtccatggaagggaaaagcaagtcacctcactgggtcagctcctccctccaggcgggctcagcctgaccacagggcggtgggaagaagccgcctgagcaactccagttccggcactggcattcccagagttccccatgcctgctggagggcattaggttggagttccagtggcctctgttcctgggctttcctgccatcctctccatacccccagcccctccctggctccctcacacccagcttcccatatgcccattctccagcctgcagtgtgcatattcacacatgcactcacaccgagtcccttcttctctgcttccccctccctgcccccagcccagacagtctaggaccccatcacatttgagggaggagcactggatgggccagggctcagtaatatgccctggttggtacatgaatggaaccctctctctgttgtgcacattacaaggctgaagctataacccaggaccctggtttgctcagcttcctgcgagaaggagggagggaagagaagcaaggctcacactggctacaatttgggtggaggtggaggttgcggggagaaggtagtagaggagctgagggcagtggctgggagtctgggatctgggcgtggtactgctgtgctgtgctgtgtggcttcagctggccctttccctttgccttcagtttctctgactgggaactaagggtggggccagcgctttgtgtccctcccagctctgatgccctcacacagaaccccagagcttgctgtgagcagctgctggaccatgcctatattatcctgcctctacccctctgggggcctggttggggaattggttgggatctccccttctggaggccccaggccccagacttgaagctaggggtggggtgtgctccatcctccactgggttgtgatggtcaaggtgggtggtgtggggccttggggtgtcacagagactctccaggtgctgagctgcttttgagctgcagccttgtgtaagcttggcactgtggcttcctctccctgcagatggagggcgagctgcacaagggctgaggatggccaaggcagtacttctcaggagagaccaccatggacggaagagccccttgggttggtgtgggagaggggcctgtgtgtgtgtgtgtgcatgtgtctgcctgccctggatttttttggatagatggtttggggccaaactccagggagcctgagagctgctgagagggatggaaatggctccatttctaggtgcacaatccaacgcttagatttctttccaggcaccgatagagcccttgccttcccccagctgcccccactcccctgagacaggcttgtgggcccagaggctcatggaagtttagtgaccccttctcctgcagtctaaattggagccgcaggacccagtgttctgagtcctggcgtccaatttcctgcctgcttcccctgtgccccaagagacctgctgcagcagcaagggcctgaggcttttaagggatgcatttgggacctcagctggagcctctgttggcagaatggtctctgattaatattgctcatgactcctaggtttcttatttgtctctttcaaaccaccatgtatgcagaattcaatttggggcaaagaagatggcaaacaaggaatgcacccaacctttctggctggttggggctggcaggggctgctccctggcaggggagaatcagccccatgctagggaccaaggtatccctgtgtaacttgtctgaagagtccttagctccattggccaagcatactcccagggcctagcctggggcatggaacactgtgggtgcctaatcaatgtttgttgtgtgaatgaatgactaaaaggagagcagaagtgttgcctcagttcgggagctgggggtgcacctctcccccagggctcctgggtggtagtcacttaaatcttgtctggccccgtcctgcccagcctcccctaggcttcagcagggctgaatggcagtgtaatgggaacaggcggagagctggcgctaacaattggaacatctccggtcagccggggcccattgtggtctcttcctgcctctgctgcccgctagctttgctactctttgtgttgctgcctcccaggtggccagcgtcatgcccatagtgtgtctttctggcctgctctggtgtctcagaagtggcctggaaatgttttgctgattattaggctctccagtcaccttagagccaggtaggcagttgcagaaagtcagttgctttggtctcagctgctggaatgtttggagttaactcttggttagtcctcattttctgagcatgtcctcagaacccacatcagtgatagcagtgctggggtggtagcagtggaagggacacgttgccacctctggggctcatagcctggtggaatgcagacgagtaaccgtggaggggtagaagtgtgacatggtggtcaggacgtaggctctggaggcaggcagtcctcacttcaaagctcggctttgccacttactcaatgtatgccctattcatgttgttctccctccctgggcctcagtctctatatctggagaatggggacaataccccttctgcttgcctcagacagcgaagggggtttgcttaatggttgagttttggatctcagatcaggtgagagagggctctgggaaagtgacggaggggtcagacctgggccaggaagctatctctggggcccacccagcccgtgattggggatccctcctgcatggtccatgtattccttgcgggaagcgaggtccactctggaacccaatggctccttgttgcatttcaaaatgccaaggcagttggaatgtttaaaggaaaacccagatgcgtgctgcccttctcctccctcctagcccccagttctaatgttctagaaggggcagaatttctctcctgggtcagccccttgcagcctgttttctacagctgcagctcctctccggcacccttggcttcctcagtttgttgttcttttatgaggctctgaaccatgctgagtgctgcccccattccgtcctcctctcaaagtactgccagcacaaggctgtgacgtggaacagatttcagagaaagtttgcagtaatgcagggaggttggggaaggaggcaagggtgtcacagcacagaaaagttgtcaaggcaatccatccaccattccctgccataggaaatatgtctcagggagtgttcccccaacctcagcctcctatttccctgcagctctcatctcctggactttcctctcccttctagaaccttctcttttcttgccgccagcttctaacccccaagtttctgttattttcttacatagatccttttgactcttacttggcactaggatctgcttctggaaggccaaagaaatgtcccagtgtgttctcttaaacaaaagaaaccacctcctcttgtctccaccctcagcaacacaaggaaccagcagaagctttgaaattacagttttcttaaacatgatggacttcttaggcaggactccctccctccccagtccatcgctaggtgggaagaagtagaaagatttattctccctaagtccgaagtgaaccctcatttacataagggagattttttaatctggctgtgcctggcagcccttggccctagggatagctttgtctcagaactgcccatataccttgcttcgagggggcctggccttcacccacaccagggccctcattcactgcttttcttaggaattgacttgacccacagtctctatttttatcttgctgtcttctctttgcaactaattttgctgtctttgacaatttctttacttcaagtatgtgttaagggttctaccttgagcccagcactggcctggtgctttgagaggacagaggagctggatagggcatatgtggtgggcatttgagaggtgggctgtgtagtggtaggagtgtgggctctggatccaggctacctgggtctaaatcttgattctcttccttactcctgggcaagttactcaattcatctgtgcctcagttttctcaagagtcttgggtgaaaagagccctgtcttccaggggttgttgtgagggtcaagcatatccatgggaagcataaggaacagtggttggcatggagcactgtggtgcgctaaggtcctgtggccctttaagcatttactgttttacgtgctgcgtggttgcttccctcaacaatgacagtttgcctagtgagacccattgcacggtcacagggagtaaccatcccaggaccgtgcccagacaagtgacctaagcgggagtgctgccaggccctgaggagtggctgcagtgggcagggcaggtgtcctggagggagggaccaggctgcttctctgcacttgctcttccttgaacacaatttgtgcttctcttggaatgtcctttcttcccaccttgagtccaaactcaacagggccctccttcaggaagcttttcccagaagctgggtgtcatctcctggtcctcctgcttctgaagcgctctgagcaatcaccttccctcggcgttgacattggaccttagctcctctgctgaaggaggcagttgctgacagccctcccagatgcctcccaggtggaggggagttagtgaatggttgcaactgggatcctggactaggggttaggaggctataggaaaacatacagagaggtgaagcctgggcctggaagctgtctctgggctccacccagtctatgacagggtatccacctgcacagcccaccattccttggcggaaaacaagcctccctattgaatttcaaaatggcaaaggcagttggagcatttaaaggaaaatccagatgtgtgctgcctccaggtctctcactgcagaaatcatggaagggaggaggcctcctgggatggatgagggctccccccagtacctgatgcccagagggtgctgctggctacctctcctggggatgaggtttcagcattccttgggccaggctgacccgcaggcaaatgccttagagctgtacattaccctggttagttacgtagccaattttcctccagagacttccctgcctcccatgcctgcctctctcttttcccaggaggtgccacacacagccttctgggcaagacagctgactgtgctggagcaaactgctgaggctctttatccagttctaatgcaaatcttactttttgttccctcaaaggttcttcagaagacctgaaattctgcgtgctctatctagcagaggtgagtcctttcctctggatttgaggagagagatcttcgacctggtgcttgaggggagacactgggctgggatctagaccagtgttctgatgccagcctccatacccactcatgccgaagtcctgggcaaggccagagtagcggttttttgctaggtagaatgggactagccattcctgcccctgcctctctcacctctgtgttaaagagcagtggacaggaaagtgcttagaacagacccttgagattttctgtgcaggacctcctgaactgcaggaatctcagtgggggtgtggccgggcaactgtgcatcaccctgtttactggttaatagcccttcctctagagatcgccctgattcctgtacctgcctcttgcttccacgttttccaggaagtaccaccaacgaccccttgtacagggtcttgtcagtgtttcaaaaggcctgaaggtatttgtacctttacctgggccagataatacaggctaaaacaaacatccagtgtctgggtttcaggctggaatgatacccactcagtgtggttgagattcctggttatctcagtctgatcagaagcttagataggcagtgctgtgcctttgctgagcaacatctggcaagtaacttattacttgatttggtttggtagataaaatatcattaaggctggggtttaacccaagagatccttgaagatgaaaaagttgagagccactgagctatacaaatacttttcaattttcggtgaattttctattcactgcagggcggtgtctgttcaagcaaggatgcattagacacattcctgcctctgccttcgcttaagtttgtctcatgcaacagtccagggaacctgttttgtgggaggtgggacatggtctatattggctggccaagaggaacacacccctttgagaaggaactgtacacagtttgtgattgaaaatcattctttcagttcctggctaagaagtgcaaggcctagagagagtttttgaacagccccctggaggagaagacagttgatgagaagttagctttagcggagggcagagagttccaaagaggcagtggacattgctggggctcagctggggaactgggctgcctgaaatacagacctgagggccaagagggcattggatgtcctcccctgtgtcaggcacattcccccggagcacaggaagtggctgatggaatcacttcagtgctggagggtgtttagttccacagagccaagcaagcagagaggagaagccatgaccaggctaggctcttcctccagcctcaccacactgggttctgattctctggggcagttcctgaaaggaggctccaggttctttaatgccaatagagcttccttccaggttgggttagttttttcccagagaaaaggacttctgctccattagtttcctgggatctgtgacgtgctggcttccagagattgtgaagggatattgatttgcggctttttgtttcagtaaagtgccaggtgatctgatctccaggggctgtgggattgagcttacaggcagctagaagcctctctcttctcttaatgggttgctatttagaagaagtactataattcagggaagacaagatgccttcttgctctgtagcctggaccactcttaacatgggtggttttggatcctatcaagagcctgaaactcacatcttagttggaacttctgacaagtgatttctcttcattgcctgacatgcaggtggcatccagagaagaaaaagagagtcaggatttggagaagttttttgactctgtattgagaaaggcccaattgcctgggtgatggcagctctgattgttctctagctgcaagatcctgggtggtgttatccgaaagtagtcctgggctctgggtctctattgcctggacaggtgtgtttctcagttcctgcaaatacactggacagatgcagcccacaattggcttcagaacacagaaggctctgaagtcagttgggtccatgggcacattggtcagggactattctctaacctagaatctgatgttggctccattaatttaagagtcttggagttaggaaaacctagatttgaatcttggctctgccattttctgagtgatctggggccagttacaaactcatctctgaaatggggctggttctaccctgcagggttgtggtaatgattaaatgagattcaataagacttgcatccaaagcacttagcacagagcctggcacacagtgagcgctcaataaatggtagctattgttattgtcagtttcaaaacaaggggaagggctcttcatattcatttactctccattagagaaatcacaaatgatttattggtcttttaagaagaaagctaagaggaatagctcatattctttgtaatgtgcatatacagttatacaaatatggtaagatcacagactctggaggaggcagaagacaaacagtgaatctctcctctcccgagacctcctggggccagtgacataacctctctgagccttagttttctcatctgaaaaatggtagcagctgctttccttcctacctatgtcatagggtcattaggagaactgaattaaatgacagaatttttatcaaagcaaatgaaccaacttaatttatggctgaagaggttttgttttttacaaagatacagttaattcaggagcaaggaggtaaggcaagagcgggattttaaagaggccaagaggagctgggtgtctggttggatttcaggatgcccatgtttaaatgcacaggtctgtgcccagtgcttctgggccagggccagtgcatctgaaaggtctgtgcttggctgaccaccccatagtcaggaggcaccgtctgagtgagttatgtgaggaagccttcagggtggcttatggccttgaccacagagcctgctattgagggcacagtgggcatcagtgttgggactgacgagttggatcacaccctggattaaaagagatggtttacctgtgagggaagccaggaaggtaatgagtgtccccaatttagacagatttaggcagatgggaattcagcctccctggagggagctggcttagtgctctctctcttggcttggccaagagagagagagaccaaagcttaggtctcccgaaaatgtttgcccatctaagccagccagctctgccccctgccttggaagccttctgggtcctctagtattacagcttcaagctctgagagccagagacccagccctacactctgctgttgagacaggcaatacggtcaccatctcaggtgaagaaataatggctttccaaaggagattcccatggggcagggcagcagagggtggttcttgtggtgtcagcaaaacaggcataatcatggctattaccttgcagtgtcgttggaagaaatgtcgaggtatcactggtaaggggcttagcactgtgcagggcatgggatttgagggggctgcctcagtattgagggtaggtggctctctcactgtgagaggccctcccaggatggggggagctctttcatacttttgtagggagggggacaccatcctggagcttagagcagtggacagttatacaaaaagctgccagcgaactctgcagctgctctgagacccagctacctacagaatttctcctggaggctttgcattctggtcgcctcttggtccagtctgcaagagggagcattcctgccagccacaggtgtggcagcctgaccaggtgatgagacctccccaggtgttggagatgagatcccagcatgtggttctccaaggctttgagctggagctctgctcctcattggcgatgagactcagggaggtccttagctgctctgaaccttggccattcccttccataaaatggggacaacaatccatgcccttcctgcctcttcactgcattgccaagatcagcatgagatcgtgggtgggaaaattctgtttttttttttttttgagacagagtctcactctgttacgcaggctgaagtgcaatggtgcgatctcagctcactgcaacatccgcctcctgggttcaagcgattctcctgccccagcctcccaagtagctgggattacaggtgcacaccaccatgcctggctaatttttgtgtttttagtagagacggggtttcatcgttttggccaggatggtctcaaacttctgacctcaggtgatctgcctgcctcagcctttcagagtgctgggattgcaggcatgagccaccgtgcccagctggaaagttctttttaaaattgataatcagacaaaaggaattattagtaaggcagaattcctgcttcagaacagaaagaaaagaggacatggaggcccagggagattaaggaatctgctgaagcccacccaactgggtagaagcagggctgggaggctcgggccagggccagggccagcttcatggagtgatggcctttccaagctggaagggaccacagttcctgcctcaccccccacctttacatgggaacactggagacagggagcagagggccttctggtcagcatctgcctcacccggcttctccctgggaaatcttggggtcttttgctggccatatccttcccctgccatgggctagaggactctgggcagcggagggaagctgttgttaagtagaagctccaggagtgcctcagcgcaccacccagttccctgaaaccagcaggcagggctttctttcctctttccccagatgctcttaggaagatcaacttctgagcacttttgggcctgagaggaatggctggcactcagcatgggaagtgcccccactctgaagggtggcattcctgagggttgggttggatgcagggtagaagaagtccctagatattatcagctgatgtgatagtccaccccagctcaaggcctgctttcgctgcttctggaacagcttctcccaaacattgtttttgctggccccttcttaccgttcatgccttagcttgtgtgttgccctttctaagaggccttttctgatcacctcaagtatgacctctccctttatgaccttggtgacattttcacaagttgtaattacagttgtccctcagtatccaccaaggatttgttccaggaccccacagataccaaagtccaaagatgctcaagtccttgacacaaaatggggtagtatttaatataacctatacacatccttccatgtactttaaatcatctttagattacttataatatctaatacaatgtaagttctgtataaatagttgttaaactgtattgtttagggaataatggcaggaaaagaaatctgtacatatgtagtacagatgaattttttttttttttttttttgagacaaggtctgccctgtcgcccaggctggagtgcagtggcacaatcattgcttactgtagcctcaagctcctgggcttcagcaatcctcccaccttatcctcccaagtagctgggactacaagcgcacaccaccacacccaattaatttttttttaaaacttttggtagagactgggtctcactgtgtttcccaggcttgtctggaactcctgggcgcaaatgatcctcctgccttggcctcccaaaatgctggtttacagatgggagccactgtgaccagcctaaaatattttttcaaatattttccatcctctgttggtggactccatggttgtagaaaccatggatagggagggctgtatattatttctttaattgtttatttgtataaataacaaatattattgtctttgcccctaacctgagagcatgggcttagtctgtctcatttacctctttatttccaatgcctaggactgtctctgacacagagcaggtgctcaataaatagttattttattttgtttttttttcgaggctgagtcttgctttgtcacccaggctgagtctggctttgtcacccaggctggggtacagtggtgcgatcctggctcactgcaacctctgcctgccaggttcaagtgattctcctgcctcggcctcctgagcagctgggattacaggcacatgccaccacgctggctaatttttgtatttttagtagagatggggtttcagcatgttggccaggctgttctcgaacacctgacctcatgatccacccgcctcggcctcccaaagtgctgggattataggcataagccactgcgcccagtcaataaatagttattaaacaaatgaattactgaatagtaatactagtgactgtttgttgaggcctgattgttgtcctccttgcttgccctcctagtagctctgaaagccaggtgatgccattatatccccatttcacaggcagcttggtactttcctgaggttgacagctgggaagtggcacagctgggattcaaaccaggcctgtccaactgcaaaatgagaaagggctggatagaaacactgtcttttttttttctgttccaagggatcagctgatgctcttagctccctggctgagttcatctaatcgcagccctttggggttataatcaaattctagtggaggcagacagagcttgtactcccctgatgagagtacccggttgtgggtggcaaccctgggcatgtaccaccatccctaccccgcccctagcacactctgctttaggggtggctctctgggtccttgaagctccctggtgcttgtgccaaagctgacctggatttgaccttatcccagaagtccttcctggcaaccagagcttaccaaggccattgcttgctaagcactatatgaggcctagatgaaaaaggcctttctaggaggggtttgtagtttagttggggagacgagactgtagtacttaacaaggttgaatagcgaagcgggacctaaatgtcagcagtgcctgggatgttgctgccctcgagtgagctgaacagtcacagattagaccaagatcatgtgctgggcagtggggctgcagagggccacatgactctgcccgtcaaagactttccaaaggaccctgagttgctgtttgggttctgttggtatgcccgtccaaccacccgttcagccttggccttgggatcagagaagagcgctgtgaggaagatgggttctgtgagccaggggaggtggggagggttcctggctccacagagaatcagcctgaggccctggccctctgggcttcccacgtgctccctcagctgctgctttgtgctgcctgcccctgggggtgacctcatcggctctgtcctgctctccacaggcctctgctgtgttgggagccactgccttcctcccctcccccaacctgtgggcccacagctcgccagctggcccttgaacccacttccctgcgcctctggctgcctcaatgtcactggggattagtgtgcatttgcggcttttggcggacactcccctcctggctgcagcctcaccctctggagcccagggatgggcttgggcctgggagccccctgaaccagggagcagccctgaccgtccgtttctctattttccctgacgtcagaaggcagagtgcttattcactttggaagcgcactcgcaggagcagaagaagagagtgtgctggtgcctgtcggagaacatcgccaagcagcaacagctggcagcatcacccccggacagcaaggtaagggccttgacagtggctgtggcctggctgcctcgtttcccctcagccagcctagacccttgagcctctgcattgagctgggggccagcctgagcttccaacttggctctgggcaatgagctcttggcaagcggggacctgtgcccgaatgtctctcccccttggcatgtcattgggtctgctgagtgggtctgacagtgctcgtgtagagcgacagagccaaattaagcgtggcccatcagttctgcactctgttcttcggtttgcctatggcaaggtttaattcgggctggcctccctgatgctgcctggcatgcgttcacctctgccattgggtagcctgtgcctgggggcagcacactggtgtttaacattggccccaggcggatgcgatagaggggatgtttgcggcagaagctgttgtatgctgtatagttccatgtgggccagagccaagtagagctgagtgtggactgctggggtctggggactggctggcaggagcaccggggaagattagagactcccaggggaggctgttctgggctgggcactgctcagcccatccagtgcctggggagaggggatgggataggagctggaccacacagccttcccctttgacactccgatgccagccacaaagtacagttatattaccccatttgtgagtcattcaggtcccttcttttgctaaaagtgctggccatttgggaattgggtctggttggctgcaaaagttgctgaggtggttgctctgctggatctgggcgaagaggagagatgaaagaaagctgcagcctgtaacttgctggccttttcacttctccctggtgcagtcagtcccctatgccatgggcagcaggcctatgcagggggcagttggggggcaggcctgctgaagcaggaggtagggaagaggcagttggcagcctcttctgagggccagaggtggacagcagctccccagctattcccgaaaggagtgaggatctgagaattacatcatcttagctgtgaacgttctcttgttttacactagctagtggcaagaataacttggatgagggaagacagtaggaaaagcacggacttctgagccaccctctaccaccaactggcagtgggaacttgggcaagtcactttgctgctctgtactttgatgtccccatcagtaacctgggacaatagtccttccctcaaagggttgttgtgagaatgaaatgagagggtgcatatacgggctatagcacagtgcctggtatgcagtaggcactcactcaaccatagctgtggggaatgcattgccccctgcccagccccaggtggtttgttgcagcactggctggttgccactgtcaggttcttctactgagcagagacctgtccccatgcctataggctgccctgccccactgatcctgggttggtcacagtcagaatccaggccgcttcctcttcattggggtggcctctgggacgtcgaatggctgaacctatgccccagttttttttcctttgggcttgtgcctccttttctgggggaaagagctctttgtgcctcgctctcagagtttgctgactctggagtgtgttagcagcagccttctcaataccttggagaatctctccatcttcaggtttgggaggccagagggtgactgaaggcaggctgtttctgaggcaggttgtggtccctgtagggctttgggcttggctggctgaccctggaacggcccaagggtttgaggcctggcttcagggccacactagaatgtatgggaatcctgagcagagcagtttggacacctcttcaaatccaaactcttcaaacgcgtgttccatggagaagctgtgtgctggacaggagaaggatgaaggagggggcccaagtgctgggacagcctcagaattacctcccgggcctaagaactgggcctggagccacactggcataccccacttgggccaccctcctaagaaggccatgatgtagctgtcttttgtcaggctggccctagaggtctcactgctcaaaattccccatccctatcaccaccatgcacatgcaaagagtcttagcaacttactccttctagacacttatggaatgctccctgagaggaattccagtaaatagattctctccagccctaggtagttctagcaatgctttagcaacctcactgacagggcccgcctggctttccagctggtccacagcattgtccacttgcgctcagttccgtcagttcctggcagcctcggggtgaccaggaacctctttaccaagggctggccactaaggtctccatctctagggcagaagaggaagggccaaacggagcccggaggctggctgcttgctcttcaggtataagggtcctgctggaccgatttgctctgagatggagtgtcgctctgtcacccaggctggggtgcagtggtgcgatctcagctcgctgcagcctctgcctcctgggttcaagcgattctcatggctcagcctcccgagtagctggtaccacaggcacatgccaccatgcctggctaatttttttatttttagtagagatggggtttcaccatgttggccaggctggtctcgaactcctgacctcaagagtagcacacctttgaatgccttttctgtgttctttctgtggatgctccaccttctgctgaacaaaggaaaacactgcctagacccccaccccacccctgcaccacccaaatgcctctctgggaaaagggggtttgtaaggcaactccccaaactcccatgctcttttcaagagtgtctgctgacacccagatgtgggggattctttaaatgtcttaaggaatgtaaagctcttcccaaattcacaaaacgtaataagtgcaatttaccttgaagatgaaatatatgcttgttgggaaggtagagggagtcaggggaagatggacttaaagaacagttgggaggtcactcccttgctgtgggaccttcagcagccgctggctgctgtggtgtcagtagtcccatctgggcactgggcccgtggctctttctatctctccaagctttgtgattttcgtgaaagctgagggccgggggccatctagtatccattttttgtagaaataaatgaactactttctctcttgtctcaacttcctactcctgttcatcacccgctccttccttttcagagctctgcccctctgttgcttcattatctgtagctggggggcgcctacctttcttcttctgcctgggaatccttgtactaaactccctgcatggggactgctgcgaggcttctaatctagaataactcagagctgggcccacctgtggccattcaggttctaagctagaagggagagacaattatatattcttttgattattcaagcaaatatacataataaatgccttctcagtgccagatactggtttagatcctttgggatcacagagatgaatgagacctggtccctgtcgctatggaattctcctaataggagagagatgaggagggcactggagtggtgatctaagcatgaaagccatgcttgcgggtcctaagaaggatccagtggggtcctggctatccaagcatcatccgtgccgtgagcctcctgctcagtacccttcatgtgcctggtgctgggctgggctccaggaagccttctgagaagcatggaaaccaagcctttaggatgagaagggcagacacagtgcagtggggcctggccccattctcagggcaggtcctgtgctccacggggagggacgcacagagcaatccatcaccccctttcctcgggagatcacagtctggtggcagagacagacatgacagatagttcaaagtaacacagtaagcaatgtgacctcaggtgagccagttagcctctctgagactcagtttttgcatcagtaaagtggatggattaagaggcttcttgtgaggattgaactcaggatgtgctttgcaaagtggcatgcaagaggagctctgaactagccgctatcgttctcactgtcatggttttaaagtgctgtccatatgggaagattcatcgggggccttgttcattgaagctgctgctggtgctcggagcacatatgacaactgctccatgtcacttcctggtagacatctgccatattccaggggcccaggcagggaaactgaggcctccttgtctgctctggctctaagacttctcccagatgtgacggtgaggtgcgtgccaccttgtcatctccactggggccactagagacagccctggagatgccagggtgtgtgagtgccttagaaaggaacagaggcaggtcctgcagtcaggcagcccggcctgagtagacagcgagctaattccagttctgtctggttccacagaaactccaccctttcggctctctccagcaggagatggggccggtcaactcaaccaatgccacccaggatagaagctttacctcaccaggacagactctgattggctgagcaaacccaagggcgggactctgcttctggcaacttaaccctttcttgggcatcccctaccacacagtaacctcacctcaactggacctgaaacagaggaccaagatggtgggtctagggtcatctgaagggagtggtcccaagggtgcatgtggatgtcaacagaaggaccacaatggtgtgagaggccttgtgggcatgcagagactggcagcagaaagtcccaagaggagaggactcagaggcttcttccttccaaggaggaggaggaggaggacattccacatctgggcttccagtggtggctcccggacctgccttgggggcagcaggagaggttgggagaggtcaccctgatgaagaacaatgccatgatctgctgctgccagaggacatctccgcccatccactcattttccacctgtacacattggctcattcattcgatggatatttcgggtgcatctactttatgccaggctctatgctaggagctggggatactgtggagaaaaagtcggatatggtctcgctctcatcaagatttcagtctagctgggagtgagcgttaaataagtcaataccaacacacacacgtgcacacacgtgatggcaagctgtgatcatctatgaaagaaaaaacacagatttctttaagagggaattgtacttagagtgctgtgtgtgggggtggggatggggaaggacataacttttaaaccgagacttgtgggctggagaggaaggagccagtcctggacttggggaagagtgttcgcggtggatggaatagcacgtggagagtccctgagatgggaaggagctcagtgggctggaggaatggcgagcaggccagtgtggctggagcttagtgaggtgcaagacacagtgggtgaggtagttgatgtcttgttgatttcattctagatacactggagagccattgaaggcttttgaggaagggagttgcaagtacatttttacaagatccgtttacacataggaggggcccaagtgggtgtgagatcagttagggggctcgttcagttctctaggtgaggactgtcctggtggcttgtcctggatggtggctggggaagtggatgcctgaatgccaggctctggagaagagatgactccctgccccatccccctgcctaccctcctcctcaatggcccctctctcagtggatgtgagtgaggattaggaccttccccacagagccaccttttggccaggcctcgtgggggatagtgggggcagtgctgagttctaggagtgttcctggaagttgggggcagtgagtgctcagcctggcccaggtgggagagttcactgctgcccaggccttagcaggggctgctgtgctgtctttctgtcccatgctgagcattgtgataggaagctgccacacagtgccctggaaactgacttcgcatgctttccatggggcttccgagggccagggactgggctgggggtggcctagcagctctagtggagactgtgctgccgcagggctgaaggaagaccaaccaaggggacagccgtttgagcccagcccactcactgcctgctgcacctccagctggagcccagggttgggcagctctcatactcttatctaactgccagacctagagggagggaagcccaaggctgcaggtctgagggacacggctcatgggcaaaagggtatcaagaggattagagtcacttgcataggaaaagagggtcagagaggctgagggctggctgaggccagagaggttccctgaccttggacattctttgtgttgtgtaagacctcggcatctttagagaaaggttcttgtgcccctgtgagcttgctcagctgctatggccacttgaaccccaaaaatggtggcctagaagagaatacaccccttacttcccacttatcctcctctcaacctaggaaagatcagacatattgactcaacagtctaacaggggatgggctggatctgcccgtgaccagaccaatgccccccacccagcaagggagtaaacgctgcctgaagtgggaccagtgatacacagcatctctgtctgccagggctcagcccgcgggggggatttgtgagaggctgagcagctgggtctgcacagacagcaagctgcactttgatttcatttgattcccttacaaaatgacattaaggggaatgtgaggcacaggagactcgcctgtctgggaaggcagcaagctcatctctcctggacctggtgacctacctctgtctaccagacaggtgcagaggacaggagctctggccacaaagaaatggacagtctgaatgcagcacacagccctggggacaggacttttcacccagcctgtcctgacaagctgctgagtcgagcagatgctcacatcagggtcccaggtccggctgttagggaagtggacatcagttcctggtgggccctgggcagtgactgtggtgagccacagcaccattgctgctctgcctctcaaatcgatcgaacaattaatttggctccacaggctcgagaagatgaaacatgacctgatggccactgctgtccagcatcccagtccatcctagctgtccaggatgatgaacaagctatggaaattgcacttgagagctataatcacgggaagcattgccgagcccctccctgctacataaatcatgctaagaagcacacaatggcctctttcctgatgggctaattgtcttggtttggtgtctcaggcccaggagctgggaagatgggagcacaaccatttattgttggaaagaccatctgtgcaacttgaatacaaagtgattcttttagttccccacacacccccgaccctctgatcccattttcatgttttttttttttttttctttttatgtctcaggctctggttcttttaaaactcttcatctatcctgtaagccatcaggcctggatctctgctggcctgggtcttttggctatttgggggttgggacattgcagaccttttggaaataatgacatttatttatatatgtcttatatttttattctttatttttccccataaattctattaccaaagtcctcatttgtcacacatggcaccaaggcaccaagagggtttttgcaaagtgaaaatgcaggcaattttgcaacgtggaagggctccccacagcgaaagtcccacagtgagagcctaaactttggagatggcaactggggtccccaggcatgatctccccccagcctcccagcagccttgttttatggatgaaagacaccaaggctctgagaagttaagtgttttatcctaggtcacacagctggtaagggccaagcttgccctcaagccaaggcctttgaacctaatctaccactcatttctgataaaaaggtttgtcttttagggatagaagtaagagaaatcaataatctccaggaagaggcaagagagggatatccggcatgtcagaagctgtggcccatcaagctgtagagggaatgcttttaggataaataaaatgagatgccttattttccacccagtggagaataaacttccagaatgcattttcctgagggtggcacaggctgaaaagatcaatagcttcccacaagatttgaaaaaagcctaaaatgagagatcagtttgagctccttaagacaggttctcagggagctctggaatggttaggttacaccccttccccttttgaatttggcatcaaaaggatcagcagacagagtcatggagtgcttggcagtgatggaatattagccaaaggcagagaggtatagcttcaggctcaggctggcttgtgcccagcgtaagtactggaaggaggcctttgacctgagaccagctgagggcacagagagggcctgcccatgtggaacctgccaggttttgtgcgcagattttgctaattgactgatttagtatctcagccctgaataaaggggaatcaaatggatctgatttcagccatctcccctaagagatgcagactcttctccctaaaaactgtttccaggcagccaccagctctcctccccattccttgctgctgtcctatcagtggacagactgccttcttcgctgtcttgctcttggtctcagccatcttgctattgttttttttagcccctgaagaagacagtgcaaccttaccctctatcctgtcttcgccttctcttcctcgaagactttctctgaatagggccatccatcctccaaactgttcccagatccttggttttaaaggtagaatgataacataaggtaacctggtgggcacttacaagatgagccaggcacagggtcaagctttttacctaccctgtctcatctaatcctcatgcagacttacaaggtgtgttacccctgttatacatttactctcattatgcccaatttagatatgaagacgctgagtctcagagaagttaagaaacgtgcccaaggtcacacagctagtgggtagctaggattgaaacttggacagcccagctccagggtacctgcttttgattattttgctatatggctttcctgtaactgcagaccatccaagctggaagggccagggagactggactgtcacactcctgcttaaagaccattgtgggaggccactgtcttcagagtaaagcttggctttccaggctctccttggtagcactacactcctgctttgcacctggagcccggccacaccataaattttccccttctctaaactcactgtgcacattcacagttagggtgtttgatctgcctgacgttgactgccctccttggctgtccctgctggatgcaatcctcaaccttcaaggcttagtggctcctctgagaacacctttctcaggcatgcatcaggagtcctgacttcccccttcgtggttcccagagtactttttcccccttagcacaattcatccttagcatctggatgactgtgagcttcttcggagcaagtagatgttatattttatttgtctttgattctattgttgtccggtccgtagtaggtgctcagtagaggttgtaggattgaattaggctgtccagttcaactctcctatattctagaatttagacaaggaaacaggtgcaaaaagagaagtgacctggccagggtcatgggaaaagttagtgtcagagccaggactagagctcaggtctcctgattctttggattcagagctttttctgttgcacctcagctttgtggagaccagagcatggatctgcacttggtttatgaaggtctgaccaggttcacttcagggtcatggataccactgtgttcccatgctgacactggggaattcccagagggaaaggaagcccagctggagctgctgctgtaggttgcggggctcacctctcaccgagccccttgcttacagagaaaaccagcgagtgattctgaaaatcttgcctcgagtcctcattttgctggtattcaccgtgtgaccttgagcaaattgcttcacatctctgatcttctgttcctttaccaagaaaaatgagggagttgaattcagatggtctccaggagtcatctgattccagaatatcaggatataacaataaagatgaggataaagtagctactcccctcagaaaaggtggagatccagatctagggggagaattggctaggttcttcatcacagtcactgtcttgagacacataggtggtccatggaaacatttccatgagggatttcagaggggagaatgggcagactgcaaagcctcggtactctaataccaggcaaaaagaagaaagggaacaggcattttagttttcacattgaaacagagtgtatgtgtatggccctatgcaaatgttgttcctggtgaatattcatcaatgtactcatcacacataggtatatttagacagaaaggggtcctcatcacagacacccaaattatgagcacattactgcctcctctcccctagaggtgcttcttccagcctcccccattggaggccagcacaagacgggctctccaacccaatatcttccccttccctccttcctttctgctcaggtggctgagtatacacattgaactcttttgtttcaacttcacgtgtatataggttggtgcaaaagtaactgtggtgttttccattaaaagcaatgtcaagaaccgcaattactttggcaccaacctaatatgtatgcaagtacattctttaacctttccaactcccagtccaagccatcaggctaatttccgcgtggaatttgtggtcactggtttgcagtcctttcatttctggtgtggtcagaagtctccttcagactcttcccgataagttgccattggctttttcatcacctttagtacctacccacttttgctgggataacactacccaagataaattcaaaaaaattgtcctaagtgttagtgtgtttctgttttggttgaagtctattattgctatatggttttctactgtttctacttgatggaagactattaagggttaagtaggctggcctaggaagctgaccaccatttataacatacttttgagtgggaaaatgcattcagaggcctgtaatcaatacttaggtggactttgggaatatagtatttattttatgagtgactagaatattggtagaaccatagaaactttgaatgtggagctggaaagcctcctccttcccccactgagatcaattgattaacaagctaggttgtagaaaccaagtgaaagaggcaaaaacttggccaagggcatgtagtcggggacttctgaagattctgctgggctgggggcaggaaaggggtcacagacggtcttagggttgtctcactcagcaactcactgtgttggccttgggaaatgtaagtcactgtgttgggctgtaatggaaatattgagaaagcagctcagctagtggcgtggggagaggttgtctagtcctctggcttatctgtaaattcctggcatgtgcttgttggagcagaatgaatggggctgctgtgttttacctgcagctaggagcatggctggagtggtggagacactccctgtggtctgttctaaaaatagcagtgggaacagagctgaggggaagaggagggggctccttcgggagctgggtggggaggcctcacccccttcctcttcctgccaggcccgatgtgaggaagtcccatggagtcacataattccatctgggagagtcctggagccatcagccctcacaccccctcctcatacaggcgaggaggccctggaggcccggagagcagaaagcactggctggtgtcaagcaagcccagagagaagggcccagttggcaggctgtttttccctggctgtttcagcacagtggctgcaggccttgtgctgaggtttgctgtcactgcctttgggcgcacagagactgggaactcctgggaccggatgtggtcaggcttcctgagagtcgcctggcaggcgaggagtccccagctggcccaccctgagccctgacctcagccagccggctgtccagtgccacacctcctcttgctggtgtcccctcccttgctgacttgtcctcctttctttggactgtctgcagggagggaggacaagggccagcctagatctggcctgcaggacagaggcctcagtggctcaggacctttccctgcccctccccaggaacaagcagaggcagctgaggtagtagcagcctcctgcaggtttagagacagacaggccagggttcaaatcctagctcttcctctcactagccatgggattactgatgggtcacagagcatctgtaaaatgagacaagaacgctgatttcactggggtcttgtgaagatcaaaggggatctgttgtaatgcctggcatgcagtaggtacttaatagtagctcttgttgcaaaaccaagcagtgaacatgtatctgactttctataacccccttccttggggcctccactcatgaggcatgggaaggtgttttttttctttgtttgtttgtttgtttgaatgcagttgactttttttttgttgtattgttgcaaaagtaatccatgtgattgatgtttattatgaagaaaacatttaatacagatgaaccaggagaagaaaatgaagttcatccttaatcccagcacccagagataaaccactgttaacattttggaatgtgtcctgtcaggcattcgtttatacacacatatatcttatttgcaaattggggttactggtgcaatttttctaacctgctttttctcccccatttaacagcgtagtgtatccatgtttccatttcaataaatattcttctacaacatcattttcagtgcctgtggagtatttcattgtgtagatgaaacgtgctttatttaagtaatcttcagttgtttatcattcaggttgcttgcaatttttctttgttacaaaaatttcagataaaaatccttgtacaggaggctgagatgggagatggcttgagcctgagtttgaggttacagtgagctatgattgcaccactgcactccagcagtgagaccctgtctctgaatgaaaaaaaaatcctcttaggtgtatcttggcatgcccagcatccagttcaacacctagtacgcattcgactctaaataaatatttgttgggcgcggtggctcatgcctgtaatcccaccactttgggaggccaaggtgggtggatcgctgaggtcaggagttcgagaccagtctagccaacatggtgaaaccctgtctctaccaaaaaatacaaaattagccaggcatggtggcgcatgcctgtagtcccagctactggggaggctgaggtgggagaatcgcttgaacttgggacgtggaggttgcagtgagctgagattgtgtcaactgcattccagcctgggcaacagagtgaaacttcatctcaaaaaggaactaaataaacaaatatttgttgaatgaatgaatgttttgttagaataaatgcctgttagtagagtttctgggtcaaaggttatatatttataaaatggattattgatcctattgccaaattaccctgcagaatggttgtactgatttctaatctcatctgaattgactagctcatcctactttgcctgggacttttccctttttagcattgaaaatcttgcttgccaggaaactcctcaatcaaatcaagtaaaccgagatagtctggataagaaaatgtttattcctcctcatcattaccaacatggtatattgttacatttttaaataggttctttttttcgttattagagatgttgaatatttatttatatgccttctggtcacttgtgttgcctcttttgggaatagcctgttcaagtcttttgctcatttttctattgggatttttatagtttaattattaattcacaaagagctctttatataataaggatatttgtgtgttagccttttatttttattatttctttaaactacagatgtttctgacttattagtcatatctatcatttgttttagagtagttttattgagatttaattcaaatatcatacaattcacccatttaaagtacacaattcagtaatttttagtgtattcacacacttgtgtaaccatcaccacaatcaattttagaatattttcattatctcaaaaagaaatcatactacttagctatcatccattatttcccccatctcctccaaccctaagcgaccactagttcatacttttcatctctgtagatttgcctatattggacatttcatataaagggaattatataatatttggacttttgtgactggcttctttcatttagtctaatgttttcaggatcatccatgttgtagcatgtatcagcaactaattccttttcatggctgaataatattctgttgtatggaatatcacattttgtttaaccgttcatcagttaatggacatttgggttgtttacaccttttggctattctgtgtaatgctgctatacatatatgtgtgcaagttttttgtatggacatatatttttctcttaggtgtacacctaggagtggaatagctgggccaaatggtaactcatgtttaactttttgagaaactaccagactgttgtccaaagtggatgtactgctgggcgtggtggctcatgtctgtaatcccagaactttgggaggctgaggtgggccgattgcttgagtccagagttcaagaccagcctgggcaacatggtgaaaacctgtctctactaacaacaacaacaacaacaaaaattagctgggtgtggtggcaggcacttgtagtaccagttactcaggaggctgaggcaggagaattgcttgaacctgggaggtggaggttgcacggagctaagatcatgccactgcactccagtctgggcaacagagtgagactctgtctcaaaaaataaaataaataaataaacaaagtggctgtagcattctactttcctaccatcagtatatgagggttccaatttctttaaatcctcactaactctattttttcattttaaaaaattatagccattctagtgggagtgaagtagtatctcattatggtttttattgcattttcttaatgactataaatcttgaaaaatattattgcctttggcgtatgatattcactctaggattatataatattcacttttttcccttttaattttatggtttattttttaactcttaatattttaatcaattgggaatttacttttgcatatagtatgaggcagattacttttcatttttcccaaatagttatttgctccaattcttatgcattatattaggacaagtaccctcttattagttttctttaaaaattatttcccccctcttctcatacatttatttatttatttatttttttgagacggagtctcactctgtcgcccaggctggagtgcagtggagtgatctcggctcattgcaagacccgcctcccgggttcacgccattctcctgcctcagcctccagagtagctgggactacaggtgcccaccaccacgcccggctaattttttgtatttttttagtagagacggggtttcaatgtgttagccaggatggtctccatctcctgacctcgtaatccgtccgactcggcctcccaaagtatttattcttttaaatgaaattcagtgtactttttaattgtagctttataattcagtccttatcttctccctgcccctcccaaaaatatcgttgagacttttattgtaattatatttcaaactatacatttaaaaggggagtattaaaatctatacaatacggtcttctcatttgagaacaggatgtgtctcctcatttatgcaaattttaagatttcccaaagttttagaaagaatttcatataggtcttgcacattttttgttaaatttatttgagggaatttaaagttttaatttatattacaaatgaaaatatttatttggcattatatttggttttttaactggtaatatacatgcacaaaacttgtaccaaaaaattctaaacattactaaactgaataaaataaaacccccattccccaagcccatttccaatcaataattactaatatatgtttgatgtggttcctccaaattttcccccatgcacatatgtagacatatgctatgttttgttttactaaataatatcatattatacatacatttttgtaactcatctataaagatataggccaggaatggtggctcacacctgtaatcacagcactttgggaggctgaggtgggatgatcacttgagtccaggagttgaagacaagcctaggcaatatagtgagaccccatcgctacaaaaaataaaaaaaattatccaggcatggtggcatgtgcctggagtcccagctacttgggaagctgaggtgggaggatcgcttgagcctgagaggccaaggctgcagtgagctgtgatcacaccactgcactccagcctgggcaacagagggaaactctgtttaaaaaaaaaaaaaaaaaaatatatatatatatatatatatatatatatatgtatatataatattatatataaatatattatagaaatatatattatataattatagaaatattttcgtggctgggcgctatggctcccacctgtaatcccagcactttgggaggccgaggtgggcagatcacctgaggtcaggagttcgagaccagcctggccaacatggcgaaagcccatctctactaaaaaatacaaaaattagccaggtgtggtgctgggtgcctgtaatcccagctactggggagcctgaggcaggagaatcacttgaaccctggagacggaggttgcaatgagccgagattgtgccgttgcactccagcctgggcgacaagagagaaactccgtctccaaaaaaaagaaagaaatattttccatcagcacctaaacttctccctctattttgaatagccagtggaccataatgtatttaatttattgatgcatgattagattgtttctaatgttttgatattctgaacaatgttgcaataaacatcttgccgcacttttctgttaggagagagtgtggcacacactaccgaagtgctctaaaaaagctttccttctgtttacacatgtcatctccccaacactattgttcttatcctattttatagttgagaaaccaaaggaacagaggttaagtacatgtacaatttgcattcctactcacagtgaatgagagtgcctgcttccctacaccctgcataaaatggaatgttattgcttttaattctttgttggtacaagaagtgaaaaattatatttaatcttaattgacatttatttcattattagtgaggttgagattcattttgttttatttttggagatggagtcttgctctgtcacaaggctggagtgcggtggcgccatcttggctcactgcaacctccaccttctgagttcaagctattctcctgcctcagcctcctgagtaactgggactacaggcacacgccatcatacccagctacatttttgtatttttagtagagatggggtttcaccatgttggccaggctggtcttgaacttctgacctcaagtgatccactcacctcagcctcccaaagtgctgggattacaggcgtgagccactgcgtccagcctcattttatgttgatcagtcacctatatttctgctttggcttgtcagttcattcatgtcatttgcccagttttttactgaggcgttatctcatttgtaagagctctttatgtggttagactattaaccatttgcttattatatgggttataattatttttctagtttgtcatttgccttctaactttatagtatcttttatcatttagaagttaactttttttataatcaagtttttttggggggttgagagcacctatattttctaaggtctttcctacccctagattatgagaaatattcatctaaattttattcagctacttttattcttttattttttgcatttacattttaaattcatctgcaattaatttaatgcctggtgtcagatggaactcttattaattttttcccccaaatggtttgaccagtttttccaacccgatttttttgaattgtctttcctttcttcacttatcatagaccaaatttccacatatggatggtttggtttctaagctctctcatctccctctttgatctgtctattcctacatcaggttagacttaatgactttagcttcagaatatggtttagtagtaaacatcccaaggccaacccctattattctgcaaaatttcctttggagttatacaccctaattctagtctgctagtggctttacccttacctttgtcacaaacatatttcaacatcaggaatgacaccagatccatagtagcctgtcctcgtggcctctaacccataatgatcatgtcggctggaccatacttctctgctttcctccatacctcctaggtattgttataattgtctggaatttcggtttccggttgtgactattttttttttttaaagacagagtctcgctctgtcgcccaggctggagtgtagtggtgcaatctcggctcctgcaacctccatctcccaggttcaagcgattctcctacctcagccttctgagtagttgggattacaggcgcccgccaccacgcccagctaatttttgtatttttagtagagacagagtttcaccctgttggtcagggtggtctcgaactcctgacctcgtggtctgcctgccttggcctcccaaagtgctgggattacaggcgtgagccaccctggccggttgtgactatttttaaacattagcactattctgttttaagaattatttacttaaaattgcacttaactttcagttatcagtagttaaggctctaaatgtttccgttttcatggcttgcctctgtctctcacataccacgtcatctcattcttgacttctcgattttaattcacttttgtctgtagagctttcttgagtaatttttccagaaagggtctgtgggtggtatcctttcttatccttgtaagcctgaaaacatttgccctcatgtttgagtcatagtttgcttgagtagaaaattctaagtgaatcgtccttctctcccagaagcctgagagcagtgttctgtggtttccccagtatttagtgttttaagagcagtttttccttgattctctaaaatttatttatggaaacaaccaggattcctctttccaatctttggaattcagaaatttccccagatgatttctagttgtttgttttcttttggtaatttttcctggtcctaactaggtaagtcctttcagtctgaagacccaagtcttcctttcgttcagggaaattttctattaatttaggaatggtttctattctgtgtgttcaatctcctctttctggacttcctactacaaataataataataataataatggtgcctaacattaaagcgtgctttctttctgtgataatatataatcttcccagcactattgttattatcctcatttcatagatgagaaaacaaaggaaaagagagattgagcagattatacaaggtcgcataattaggaggtgcaggccaggttctaatcccaagcacctggctccagagcccgtgtccttagctgctaaactatactccctgcctgtcgggtcccaaccccagagcccaccctgcccttccccccagcactctgtagtgacaatgttgagtgtcgacaggcagggactctgtaatcagtgggggaaagcttggggatgctaggatgatggatctgaaacagactgggctactgaggccagagaggggcagggattgtcagaggttctccagtgaatttagagttgggactcttccctccctcctcttcccttggtctcagccacctgcttcaggcctcctctttgtccctgggactgctgcattgcttcttgtgggtctccctcttcctactcctgtccatgtagtcacctctgtcaacagcagctgcgatgactcttcttatagaacacacgcagtcaccttcacactgctgagtgtttgttgaatgactgtatgagtgagcaaagaagtttacagtgcctaatgtgtgtcaaacactgtgctaagtactgttgatgcagtatgcattagtcagcaatctaccaattgcaagtgacaaatacccagcttccaggagtaaatggaatttactgggttagggagggtagccttcaggcctagttggattcagagccttgagcaatgtcactgagaaggcctcagcctcttcatttcttggttctatttacttaggtgttggctcactcccttagtggtagcagtgctgctgccagaagggccagggttatggccatggccttggagttggactccctcaatcatttcatcaatagtccctgggcctgatcctcattggcccaagtaggatcacgtgcccattccagccactgaggacagtgggatgggttaaactaatggactgaggcctgggccatatgcctctccctggagtgggagatgggttggttccttgtgaatcacctggcttgagaatgagagagggaaggctagttcctcaagtgaatggggtctggtcaggcagatctcagatgtcgtctacttctcggctcatcaaccagcatggtcctcaccccacagagctgacagtctaatgtggggtccagtgtggggcaaggacaccaatcatgaacagcatatgaaaaatcgatgacagttgtgccaaagggcctaatgagagcgcctactgggaggacctggggaaagtttctgaggcaggggaggcttgggatgtaaggattgttctaggtggggaccctaacgcaggccagcataggtgggaagacgaggaaggggaacagagcatgagatgaggctgaggtgtgttcaggatcagacagtgctggtcttgagaagctgtgggaagaagtgtgactttatcctgagtgcaggggttgatgggtgttgtagaaagctgatgctggcctcatagagaatggtgaggaggaaggcaagtcgagaggcagggagcagtgtggagctattggcctcggccagggagagccgatggttgcttggactagggctgaggcaccagggattgagagaggtgagagatccacaggatgtatagcaggaggggtctgcaaaattctgtgattaattgcacggggagtgtttgggagaagaatggtgctcaaaagtctagctcaggccaggcacagtggctcacgcctgtaatcccagcactttgggaggcctaggcggtggatcacttgaggtcaggagttcgagaccagcctggccaacatggtgaagccttgtctctactaaaaatacaaaaaattagccggacgtggtggtgggcgcctgtaatcccagctacttgggaggttgaggcaggagaattgcttgaacctgggaggcggaggttgcaatgagctgagattgtgccattgcactccagcctgggcaacaagagtgaaactccttcctaaagaaaaaaaaaagtctaggtcagggaaacagatggtgccattctctgagctgggagcagtggaggggagtggtttgggtggcaggatcgagtcccactgtatgtgtaagtatcatgatagggtccaagttagtgagttctcatgaaacaaagccatttaaatcagggctccttaagctacctgtggtgaggggctttgacattttgtagcatcacactgcatgtgatttattatgcaggcttgagaacacctgagctagcccatgccctattcagtgagaccagtccactcatctcatgcttagaggtggcaatgtcaagttgaagttctttaaacacaatcaatcttgctacctatctcactgcagactggtaacaagcagcctgtgaacccatatgattttgcagaccacattttgagtggactgatctagttcaaccccagtgcattttagagacagggaaactgaggcttggaggtggtgggggggattggccttgccccagggttcgcagaaggcagcagcaaagttagcatttcagtctttcccccactgaccctttgttttgatggcttgggctcaagcccaacagtccaaacagtgggtggacccaggggagtgtgtggagaactgtttccagcaaccaaggtcacaggcctggcctccccgtagctgagtcagtggctctgtgctgaacacttcccaggaacatgggctgacaggacacagcctggccctggagctggcacaagcacagtgggtcgaggattgctcccaaaagcccgaagtctccggccagcatgtggctggttggaccggagccaggaagggagacagtcatggctcccagccatcctgagctgctacagctgcccaaggtcagactgatactgctgaggtgactgcaaggcgtgccccaggatggaggcagaagccagccagcagcaggcctctgggctagctctgtagggggacatttggtctcctggcttttgctgcgtgtgggcttctccttgctgggttgggagccaccgtttccattagcaggttgggaatcatccattgcggtctcaagttgctgagaaagaggcagatagcaagggggagacatttggggaataagagattaagggcagaatatacagttaagagcatgggcctgggagccatgctgcctgctgggcttccgccttgtaacctttctgtacctcagtttcctgatctgtaagctgggcatgatgagaatagcctattcatcaacaaatggtaatgattctcagctattagtacacgccaggccctcatctgttagcccctcaacaggtgttatcacatttaattttaccatttacattaaccttctcaaggtgaattctgtcttttcacagatgatagcaacaatgacatcatagcaataacaatgatggctcttatttattgagcacttactgtgtaccaggcattccacatacaccacgtcgtctagtcctcctcagggtccgttgaggcccattttacagatgaggaaactgagactcagagatagtaaagggacttgcccaggataatttacactcagattttttagacttcaaagactgtgctctctctaaattccactgactgagctgattcctttagtgagagggcctgaaggggcatgggactgtccatgggaggggaggagtagggctggggccactggacaaccacttcctggtctcattttagagatggaggactgagatcaggaaggggaacgggcttaccctgggttctgcaggccacaaaccacagctccctgtgaacttgaacctgaggatacctgctctgtcttaccccaccccaccatttgtgtcaggtgccccagaacaaggcccgtgccaccaggaagagcaagacctacaccaagcaagcaataggagaatgtgtcccctgcccaggtgctagggtcctagaggccaaaacacagcatggcagcccccgtttgcagcatcagcggcttcatctgccatgaccccctccaagttccatcccatgggcgggctgctccggccagctctgtatccttagttcctagtaccggctccggcacagagcagggattcagtggttattgaaataactaattaacatttcttggccgactctgcagtggggagggcctttttgcatagagtctctagactcccaaaccagggctgtgagccccaggaagtaaaagctcagagctttctaagtgagttagcagattcaaagcttggactggggtggccatatacagacacttccatagagtttcaaagagcagcctggggtggtcactttcttctgcagtgagttgggacagtggcagggctctgcagaagttgaagccggtgtgtacccagcacagtcttggggtatctggggatgatgaaagctaagcagcttctggcaggggcaaggggctagtcttactctgaagtgctctggaattcctgggaccacatctttccctgacttctctctctctctttctctttttttctttttgaaatggagtcttgctctgttgcccaggctggagtgcagtgatgtgatctcggctcactgcaatcttcacctcccagattcaagcaattcttgtgcctcagcctcccaagtagctgggattagaggcacatgccaccatgcccagctacttttttgtatttttagtagagacgaggtttcaccatgttggccaggctggtctcaaactcctgacctcaagttatccccctgcctccacctcccaaagtgctgggattacaggtgtgagccactgtgcctggcctcttctcttcccttctcttcttttctttttctttctttcctttccttttcttttctttcttctccccctctttctgtctctctctctctctctgtctctctctttcacggggtcttgctctgtcacccagctgggagtgcagtggcacaattatcacggctcattgcagcctcaacctcctgggctcaagcgatcctcccacttcagcctcttgagtagctgggatcacaggcacacagcaccatgcccagctaatttttaattttttttttttttttgtagagatggagtcttcctatgttgcccaggctggtcttgacctcctgggctcaaatgatcctcccacctcagcctcccaaagtgctgaattacatgctcgtgatggggtcttgggagcataaacccatgaggtgcattggtcttcacgcaatggaagcagtaaaggaagacagcggaaatctcactgtggtgtgggctgtaggggagcagcctgtctctggcacctggctgcatcccaggctgttgctgcatcccccctggggcctgtctaaagacttgggctctgcttgggggtactgtattccaaaaataggaggtgggtccctgctgaacctcgctggtcctagccctgggagctgctgccaacctgtctgaacagtgtggagtttgcctgtgtggttgggctgtacagttctctgtgtaactgatgggctcatctgttccatgggctgccctgcgccatggtgcaggacacagtggaaagtgaagtgggcttcatctgtagccctgaacttactagagtgtgaccttagtctctctatgcctctgcttacacatccataaaatggggatattagaaatcatatctgaggctgggcacgtggctcttgcccgtaatcccagcactttgggaggctgagacgggcagattgcttgaggccaggagttcaagatcagcctggccaacatggtgaaaccccacctctactaaaaatgcaaaaaatcagctgggtgtggtggcgcacgcctgtagtcccagctactagggaggctgtggcatgagaattgcctgaatccaggaggcagaggttgcagtgagccaagatcgtgccactgcactccagcctgggtgacagagcaagactctgtctcaaaaaaaaaaaaaaaaaaagaaatcatatctgatagggctatgaggattcaatcaatcagtccatcaatcagtaatcagaaagtgcttagagcagtgctgtcatgtgtcagataagtgtttgttatgtatgaaatatgtggatcagtgattggggcccagttcctgagtacccgggtgctgacccctgggcctgtgggccacctagatcttaccactctctagatcccagtttctcctgtactgaacagcaccatcatttatgtacctctgagaagcactgggatgtggtgaacagagcactggactgggagttagcaatcccagccctgccactcagttgctgtgtttccttgggaaagttactttccctctctgggcctcagtttcactgactgtaaatgggaaacaacagtgaaagatctccaagggccctctggcttagaaagcctggctgccagtgactcccctatcctgccctaggctatacactgggaggccccccagccctgttgatttgtgtctggagctatgggaggcagagggcagtggctgccccagggctcctccagccatgggatgctctcctatcctggcctggcaggctctgggccttggggcactgagctgctctaccctttcctcaccatgctatggtccagagcattgatgaatgtattctggactcgttctggactcagcacactgggttggcagagctgctttgcccatcacagcatagggcgtaattttggagtcattagtctcactccatggctaatgtctgcctccctcactggactgtcagctttgtgaatgcagggccctgcctattggttctctgccaatccccagggcctaacacagagcctggcacagagtctatgctctgtaactgtttgttgattgaaagaaggtgacaactcagctgaagctcgagggcacctctgacgtgaaggaatcctatattcaggctccccaccctaagaaatcttatcccacacaccagaaattccatcctagaaaccagccagcctcattggtgattgtttagctccatcagaattggccatctcttgagactcacctccttagcttcccaggccaagggtgaatcctgcttttcaggagccagcaggatgacagccttccagtctagaaggttcctaggccctgcaaggactgccttggttctgcccccagggacaagatgaaacactggttggagtttgtaagtgaccaactcagaggagggctattctgagtcgacccgataaagaatgttttcttgtagcagtgtgcatgtatatgcttgtgtatgtgagagagtcaggaatacagagtcagagatagacaggggcagggatacaggcagaaacatcccgagaccctggggggtctctaccatagggagagaaagagacagagacaccgtgcttcagcctaggtggccaaggtgggtggggtgggcatgggaaaatagaggctccttctgtccattttttctgtgccatcatcccaggatgcctgctgctctggtgggagccagccacaagttgggcattcccaacttgggcctcagggacagcccagggtgcatttgtcaacatcatgacaaactgcagcaccagagaacagctctgtgctggcacagcagcatcttgcagttgtctggctgtatggtggttaagagcgggcatggtgagtaggagcaactagttttcagtcctggctatacagacaactggctatgtgactgtgggcaacttcctttgccattctgtactttggactcttcatctgtaactggggtaatcatagtcctcccctcctcacaagctgctggtgaggattcagtgaattaatgcaggcagagctctgggaacagggcctggcacggagttcatgctcaagaaagggtagccaagagccagctcagagaatcctctattcatcccacaggtgggcaggttaaggttagcagcctccttttacagatgaagaaaccgaggctcagagaggggaaggaacttgctcagtgacacccaattaaccagtgctggagctggaactggagctggggaccctctcctcccagtccagggcttgttccactgcccccgcagttcctccttggggatgtctctgtcattcagggctgtaactctcattatagccaatattactgtaacaggatgttacagtccaaactgccctcccagctggctgtctccgggggaggaagccccaggttctctttccacataggattctgcagagtttagcattcaaagattcagctgtgtgctgggaagggactgaagctgccaccccccaccctgggggcagtcgcattctggaagtcagcgtgtgctggctgcaggagcctgggttcagttgcagcctcccactgggacaggaacagcgtcggggtgggggtgtgacagggaagcctcggtgcctcggtgattggcttggtcttgcagggagcggctgccagcaggccggctggaggcggctttgcgctgccccagcctgggagccctcaggatgtgtgtggggtggagcctgctagggatcccagtgccagggggtgccgttgtgagggatggacgcctctcccccggagcagcactttggggccagcttgggccctggggatgagccacaggggacccacagcctatgcgtgtgagcatgtaacccgggagccagctgggcccctcgcggggtgggcagaaggacgggctggcccaggaccctcttctttgagacatcccggactccatctcggatgaaagtgctttgagaaaccacagagttttctgtttaatggaagaaagaaatccagcctctctccagagtggcggtggccggctagacagggtgtgtgtttgggaaaggcgctggaggaggaggaagaggaggaggacaagtaggaggaggaggaagaggaggagggacgggtgatgcaagggttttgaaagcgctacctagatgtgggaggtggaacctggtcatttggttctgcttttcctagcaggtatcgctcccctggggaacttgggtaagtccataaatagctctgctgacacaaaggagctctgtctggggaaggcagccgcttgacacggccgccaggagctgccacagccacggccgcccgcctgcgggaggagccgggtggaaacctgggcgggcgagctggcaggagcggcagccaggagtcgcctgggtccctgctggagtatgctgggtaggtaccttggtgacaggactgtgtgtgtggtgggcgggcatccaagccaccctgtgcccctgtttctattgtttcttccccagggcagccattgataggcatgttgcaaccaaaccatttgtgctctgttctgagatagctctgtgtgtgtgtgtgtgtgtgtgtgtgtgtgtgtgtgtgtgtctgtctgtctgtctgtctcaggggctgggagccctgcaagttttgggggatgcttcctctgttggctgctccccacttctaggctggacagccagcttttctttctcagagaaacaagaaatgtttggtggccaaaaagtcgggacactgcatgggaggggagcgctcagccagcagggttggctattgtatcaggggtgctggccgcacaccaggcaccagggatggaagctcgtgtctagtttcactggcaggggaagaggtggtctctggaactagtctcagcgggttgcctttggtccctgagacggcctctgctgaaacgtccactggaagcacaagcaaagatgctttgcctctgacctccaaccccatgggagagggcctgcacctgctcccttggctccagctgagacccatcaggcagggggtggtggtagagacaggctcacaccacagagctggccactgtgagcagacagaggctaattcttttcccagcctggagggtccacatctctattcttgttcccaggtgtccaggaagaacccttgaaccctaggactcagggcaggaggataaatctggacccagaaaggggaggagccttgtccaagtttgagcagcaggtctgtggctgagcagggaccaggatagagaacttctgcctcctagaacagcaagaacaggacatgtgggaaaccatttccctgacctgaactaagtattataattcagcttcaaatctgaccttcctgacctgagaggcttggtacaccaggccccacagcgatgcttgaaaactttccacatcctgctgccctcaggccttctggctgggtggctatctggcgtcctctcccagtgctagagtgggtacatctcctcaagggaaggagccgcagaggctgccctgctggtgcctgtgggatcccagccagggcactgcaggcatagtcaaagtttccaccaaggccccttgagtcctctgtgcccagccaaggggcacctcccctcttccccagccctagcacatggtgtggcttagcctagggcaggcccttcagggagccgagttccacaacagggctcactgcaagcccagactggcttctgagaagcaggcagattgtgaggatgaggcagttgaggcaagtgaccactcctcgtgagaagtctccagggctttgagccagaaattgttgatgggacttctgattataagtatgtggtatcagtgaaatcattgcacttccaggcttccttgcctttgcaaatgctgttccagctgcctggaaacccctcccctcccctcccctcccctccccctccatgtcttattttatccaaacttccacaactagagcaaatactccagccagaatgagtctgtccattggtggtggcacccatggatattgctttgtgtcctatgtatgcagaatctgggccttattcattccttagtcgcaaggacctggccaggggcctggggcatggttggagaggggcgttgcattgtcctggctagggcaggttttctttgaggacaaacagtgacatgcaagtcagctgtgtccgcccatctcctagctctgtgcctggcatagagggcctgtcggggagcccctttaggagaggcctaggctctgaatgtcaaagttgcatccatagggccaagggatggggctgggtttgataggaggtgaggcggggagaattttggcttcatcctggcggagaccatagggagaatccactcaggggtcatgctgggctaggtggaattcacagcatagcctgggccatggagggtggaggggatagccctggcttgttgaaatgcaatgctgaaggacctttgcacagactacaggggattggagctcagctccctggaccctcttgggatggtgccaaccagagtaggtctggggttattgatcctcaagccagtggtctgtgtggctccctcagaagaggcacagctgaagagagagtgcctatccccagctgggtccctgggggccttgagagctgcttcccattggcctcttaaggccctggagatggcagtctctttgccttctattaggttggtgtaaaagcaactgcggtttttgccattaagagtaatgtaaaaccgcaattacttttgcaccaaactatagatagatagatagagaactgaggcaggagaggaaggacacttgcctgaggtgacatgcgactcagcaggaaatcagggacaagaactcaggttcccctgcccaggcctctctgtactgcaccaactggatgtctcagagtatccaggtttcatcttggggctctctttctggactcaccagtgacatgtcccttttggaccttcgggctcactgactagagccctgctatcctctgggaaaagcagcatgtgcaatagacaaagccccttggtcggtgggctggagactgcggcaccttctcgtcccttcttactgatgatttcaggcaaatatgccttgtttctcacctcagtttctcctttgtagcaactagggactggaccaagtactgccaggtgccttccaaatatccagttctctgattctttgcaggccgtctcctcttcctggcttccaaaagtcaatggtcagggccagggcttggtgcagcagagaagcagcccccagcctgttccccaggcgcctctgggcaggagccttcgcatgcaagctgcagcccaagccgaagctgggaggtttgttgttgtttgtggagccaggcagtttccaagatgtcattgcttagggaaaaccatcattcctcccaggaataaacaaggctgcttatggctcagccccctaagcctggagaagctggagccactcacagcagaccagccaggctcagcctcagggagtgctgcctgcccctgcacaaccagctgtaccctggcttccaggattggagtggggatgggggcaggatggtgggaggtgtgctagagccataagcctcttgggagatcagagcttccgggcacagatgagagggaagagggtcccaggacatgctcttccttctggcagtgggcctaagtcatcactcgagatgtgtggatagctgccaggtatgctccagatggcccagggcttctcccctctccctgccctccatgggccagcccgcttgcacctggtaccgtggctcaggctgctgccggagaactgtcagcggctcccaacttagaaaggggggtgtgtatttggaactgggcatgcttttcgccacatagccagggctctctgtggtgtcctcagttacctcttactggggttagccttgggcaaatagcagagctcggggactcagggaagggtggcagagggtaagggaacaaggagagaggcagagaaaggtcttggcagtgcctctggggaccacatggctggcaggaaccttgacagcaggccgaaggcagccaggagaaggactgtggaatgggaggtggcatggctatgccacccctcaagtcaagggttggaagcaatgttcagccaggccatgaaatcttcacttctcagacctcacttcctgcagttcccagttgattcaaatagcagcagctctgtactgtcctctctgcctgtctcccttccgtgtctttccttctttccttccttccttccttccttccttccttccttccttccttccttccttccttccttccttccctccttccttccatgtgtgttaagcacctactgtgtgccatgtacttacaaattactagtggcatagatctaaaaggcccaatctttaatctagtgccaggatgttcaggtaatggacagtaacaacacagctttaatggagaggcatggggtggggaggggggtgctgtgggactccccagggaagcactcagttcagcctgggagcctcagcaaagcttcctacaagaggtgaagctgcatgtgattgtacagatgcttgcccattgaagagcaggtctccatcccagtctatccacccctcagaggtgtagacatgtttcccgcctatccatggaaattgcttttgtgtgtccagccacatgctcctccttgtctagggaggttgtataggaatatgggctctggacttgagggaaggatctctcctaccttacagtcttgtgctcttggacaagaatggagcttctcctgccttcatgtcctcaagcagtggtctagcctcctcgagttaaatgagataatagctgtaaagcacttagacatgtttcatgtgaatggattctgtgtcctgatagcagtgggagtgccactagcgcccatctcataggtggctgttattaaatgcagcgatgtaggtgaggtgcttggcgtggatctgacactgagcaggcattcaggaggcagcgcggcagcgttttgctggagggaaacagttggaatgcgcaatcagagatgtgtacaaagcaaggagctcaccgagaagcagtgagcctcagcccagggagcagaagaggagacactgggatgaggggttttatttgtttttaaaataaaccttttaaattgaagtgcagcatacttccagaaaaattagaagaatacagccaatgaattttccacaaagcgtacccccatccaggtcaagaaatagaacattctggtaccctaggaatccccacaaataaccctcttttagttactatgacctcaaaggtaaccccgtcctgacttctttttttttttgaggcagagtctcgctctgttgcccaggctggggtgcagtgcactgcaacctccatctcccaggttcaagtgattctcctgcctcagcctcctgagtagctgggattaccggcgcgtgccaccatgcccggctaatttttgtatttttagtagagacaggtttcactatgttggcctggctggtctcgaactcctgacctcaggtgatccgccctcctcagcctcccaaagtgctgggattacaggcatgagtcactgcacccggcccttgtcctgacttctctcatcgatgagcgtagcctatccttgaattttgtgtaaatggaatcattgggtacatattatttcatgctgacttcttttgatcagcattttgatggcaagattcatcaataatattgtatcaagctttattttgtttattcttgttgctctgtggtatttccttgtatgaatataccgccacagtttatctaatctactgctgatgaacatttgtgttgtttacagtttgaggctataatgaatggtgctgctatgaatattcttgtacttatcttttgatatactatgtttgcttctgttaggtgaatacctaagttttgcaattgctgagtcatagagttgtagagagttagctttagtaaataccatgatattattttccaaagtgtgacaggaatatactccctttaagctgtacatgaaagagcctattattccatgtctgtaccaacattattggtattagatattgtgatatctaattgtggctttaatttgaatttccttgatgtctggtgaggtcgagtccctttttcatgtgttgattagccatttggatgacctcttttgaaaagtgcctgttcaagtctttcccccattttcctattggatttttttttctgattaacttgtaggagcttaaacgatattgtagatatgtgtttattgttggatgtgcacattccaaatatctcttcccactctgggatttgccttttcactctcttaagggtatatttgaagaacacaagttcttaattttaatgcagtccaatttgttaatcttttttcttttatggagagtgtttgttgagtcctgtttctctgcttattacaaggttatggacatatacttttatgtattcttttagatgttttatgtttcatatttagatctaaaatccacttgaaatagatttttatccatgtatgaagtagaggtcaagactcattttctctggataaatattcaatgtattcaaaatccatcctgtctcactatagggcaatgtcacctttgtcagaaattgaggggcaatacgtgggtgggtcacttgaattttgaagaatgagtagagcttcagcaggtggacaggggaggggaaggtgctctaggcaggacgtacagtgtgagcataggtttagaggggcctgagggtagagtgtagcagactggctggagggaaaagaggagaaacggtgtggtggagaggttggcgggggcagaacacacagggttagaggatgggactttatcctagagggatgaaggcattttgagcaggagaccaatataggcaagttggtgcagggccaagggagataagagaaagtctcatgacagagggaggcaggagggtgggtttggagaagactgtaaattcagccaaacctagccctgacatcacccccaagcagagatagggtgtgcctgcctcaggaggcagcggtgaggctgagtgtgcctgaggctcgggagggtgaccttcggccacagggttgtggcttagtctcatgtccacatgtccactccagtgtcctcgagtgaaaaagcctcttttttttactggatgggcaccccaccaccacccagtgcccccagcgctgcaggccctgaaggaggagggcagtggggcagactggggcagacagataaggcaagggtgtgtatctggaaagggggacctttctgttcctcctgcccttgatgcccccacaaggagacctggctatgccttgggccctgaactctgatctttctaggctagctgagattcagaactggacagacatgctgggaagagcaagacccagtgaggggagtgatttggcccaggccatgcagtgagccagactgacccagcctaggggcaggctgagcacagactcatctgccttctcagcttccaagtttccccccctgaaacctgcaactaacaggactcctgtcctaggctgctgtaagggtcagaatacgtcaagtgccctgtcccggaattggatgcaggagagggagctgatgatgtcgatgatcgtcatgagagtaacaattatgattacagaaattgcagatgcttattgagcacttactaggtgccaggccctatgctaagccctccccacagagctgtgatgtgggtactcagtattcacattgccattttacagatgaggaaatcgagcctgaataggttaagcagcctgtgcaggtaccttgacgtaggaggtggcagagccagggtttgaagcttgatttgcctatctccaagccccagttgttcatcagcaataggcttccctccttccacctctggctttcagtcctccctattctcagagctgttgcttggagtaaaaccttagtttttgggttggtccctggtgcccactcatgagagagtcaagctgtggagaggaaggcaaggagcagaggggcaccaccatgggctactgtgtgccaggcactgcctccatatgccccgtagcagccgtgaggaagcggcacactggctgtgagggaggcggcacatggataggaattgggattcacccccaggccctcctgcttccaaaggctgacctcatgactgcagtgctatttgtgtccttccctgaggtcatcctggcatggcagagcttctttgattaacctagcagaaaacatcacagagaagccacacgcttctagctctccccacctggaaggggaccctgggagggagaggatttgggagggtcactgggtgtacagaattctgcactgcccctcccaacaccaggtgtcagtctcctgcccctcagtctccaaccatgtggagtccgagcggggcccctgcgtctggtattgctctccactgcctagcacagagccaggcccaggtttgtcctcaggaagcatcctttgaaggaagggaaggaggaagtgaagacggcaggaaaggagatcacagaggagtagaaagagcagggctttggagtcaggcagaccatggtttcaattctgactcttccactgacttgctttttgatcttgtgtaagttacttaatgtctctaactcctagttttcttattaaaaatgatactgatctcataggattgttggaagtagagcctaaagtataaaacaactgtcacagtgtgtggcatgcagtagatgctcagttaatgatctctctctctcccctatctttgtcatcattatctgttttgaacacctctagcttcaccttccttacctctgcagcgctaagtaaacattgctttcagggtaacgttggaattccttaaaatatccatgctcctgcctcatccaaccacctccacttccttgaatgttccctgctggctctggctcagcctggaatatcctgtcccatcttttcccccctattacctcctcccagagccatcctagttgtccctgctgcctctacttccacagcctcctagcatggtagcaggtgggtgagagatggacctggcatctccaaggcagagaacatggcttgttgctgtttggcagcaatagccaacacaggccctggcgcatggctgcagctctgtaggtatttgctgagtaagtcttgggggaaatggtgtgaataagccagacatgatcctgatgagccaaacaggacctgcccggggccatgacagcagggcaggctgggtcttggcaggggagcagagagccttctagccagggcatccgaggcagattgaaccagtgctcacagggatgggcaggaagtagacttgagggatagagagcttagggaaatgagaggtcccagtacacacacacggagcaggcagaaaagcagggtgccgggtgggaaggggagtgaggatggatcccacaggcagactggttcctcagcagagccccagggggcctggagttccccttctcacaaggcatcagtcaccactagctcaggaagaagctaggaacccccctgctctcaactctcaactccctgcttttcagagaagagagctggaggagtagaaggggtgtttggggtggtgggtggggacaaagactacgagtccacccatgttgaagcagtggtgtcagaaatggaggcgagaggagaagggacctggtgagggggtgacagggcagcaccgtgctgaaacccagaccccgggagccgcctccccgccctgggagaagctgggcatccaggcaggtggtggtgggtctccagcaggctgcaagcggcatgtccttctggcttggtcaggcgatagccaagagtaggaaggttttctgagggggccctcgtgtctcctctttcctcagggattccctttctgtgagtgttggctttgtcctgagagtccctgcgcgggggtgagctaaccttctgtgcctcagtattgctttctgtagagtgggtgcactccctgctgtggtgtgccgccctcctgagcctctgacagaggagcttcagtctgtggtcgaattcttcctttgcccctctctcctcctgcagtggggcctctgtttagggaacgtgaatgggcagctgcctccagggaacttgccacctcccccgtcctgctccaaggtcatgcctcttctgcacaggctccccactatagagagggttctatgtgttggaactggtcctgggcgaggttctgggctggattttagtgctgattctgttgtatgaccttggccttatcacttcccttctctgggcctcacgtaacagacagtcaccttgcctgttacctgacgccactctccagaattgtctcgtcagtcagaaagaagtaaaaaggcctgggccttactcctagggactgtgatgcagtaggtcttagattgggtccagacaggcatttttaagatactcctcaggtgattctaaagtgtacttctccgttaagaaccaatagtctaggtcggtgtttttcaaactttaatgtgcaaatgaatctcctgggatcctattaaagtgcaggttccgatccagtgggtgtgaattgaggtttacgaatgtgtattttatgaggtcaggagatcgagaccatcctggctaacatggtgaaaccccgtctctactaaaaatacaaaaaattagccgggcgtggtggcaggtgcctgtagtcccagctacttggggggctgaggcaggagaatggcgtgaacccgggaggcggagcttgcaatgagctgagatcacgccactgcactccagcctgggcgacagagcgagactccatctcaaaaaaaacaaaaacaaaaacaaaaaaatgagtgtgtattttatataagctcctgggtgatgctgctgctggctcttgggctgcactttgaggctaagagtctagatggtcctgtgaagttcactggattgttctttctttttttttttttgagacagagtcttgctctgtcaccaggctggagtgcagtgacgtgatcttggctcactgcaacctccgcctctggggttcaagccattctcctgcctcagcctcccgagtagctaggattacaggcgcccaccaccacgtccagctaatttttgtatttttggtagagacggggtttcaccatgttggccagtatggtctcgatctcctgaccttgtgatctgcccttcttggcctcccaaagtgctgggattacaggcgtgagccaccgcacccagcgattgttctttcattcatttattcattcaaacacttcaggtggggagtggtcagacgtgaggctacagggagacagagcccagggtcttccagggctacagaatttggactttatctgagaggtattggggagccagccacagcaacgttttaagcagaggagtgacaagttgaggtttgcatggaggcagctcccctgacatagcacagagaatggccagtggggtctgcaccgccactgtgagccccacatcatcctggtgggggatgacagtggtctagagggaagtggcagcagtggacatggagagagtagaaacattctttttaaaaaagattaatcaactttttaattttttgattttttacttttgagacagagtctcactctattgcccaggctggagtgcagtggtgcaatctcggctcactgcaacctccgcttcctggattcaagcaattctcctgcctcagactcccaagtagctgggattacaggtgcgcgccatgttgcctggctaattctcgtatttttagtagagacagggttttaccatattggccaggctggtctcgaactcctgacctgaggtgatccacccgtcttgacctcccaaagtgctgggattacaggcttgagccaccgtgcctggcctcaacttttattttttagaaattagctttagaaattagtgcaaagtacagagagttccaatatactttgtcctacttattgccaacctccctagtaaaaagatccttgaagttgtataagtgatgatcaggatttgaggattgaccatgggggtggtcacgaaggaaaaggagaaaatgatggccaattccctggtttgggcaactggtggtggcttcattgatacagggaccattagaggaggaatgatggacttgcggggagatcacacattcagtgtagggcttgtagagttgggggtactgatgggatatgcagaaggaggtctccatccatgtccctgggatgcagccacacagctgtcctctgtgtcagcagcatgctaaggctcttcctggcccggggctttggcctatgctgcttcctcccctagtgagccccgccctgccccttgagcagatttcggtctccagccattccacagggcggccttcccaacactcccctggactctctcacagcacccgagggttttccttcacactgcagatcttggtttctgtttatcctgtgtttatggcagtgatgacttggtcaatatccctccttcctctctagttcgtaggctccacaaggacaaggatcatgtctttcttattccttcctttatgcacagagcctagaacagtgtctggatgcagaactattccatgaggatttgttgaatacttgcctgtggcatctcaactcaggaaagcggtcagggctggcagagtggactgcgagtcatcagtggccagatggtgcagatagcgattgtggcctggggagtgggtgggttcccaagggagtggacaggactgtgatgagaggggccctgcagcaggtcctgatggacaggcagacaggcccatgagagggtggagaaggggtgaaattcagggagggagatgttaaggccacgctgtgctggagtgaccatggctatcgtttattgagtgctcatgggtgccctcatggtgctgagctctggatactcattagctcatttattcctctaacaacattgtgaggagattctagaaatcctatgttatggctaaggaaactgaggcacagaaaggttaagccaaaggtcacccagcaagtaagtgtgaagttagtatctggagctccccctaatgtaagtaccgcctccatcctcctgaattttgccaaacctgctgtgttggagacagtggaggtagaggggagaggagtatggcctggagggtctctgagctggtggcggaggaaggactgggggtgtcagcctctgggtggtcaagaggccagacctggaggagctgggctgacgctgagccaggagagctaagtgttagctgagccatcaaggttcctggaagctagcattgagtcagggacctgaggctagggatccagagcatgccaagcttgaaggaacagcccatcttgaaagcctgggggtccaaggcagggcaggaattctaacagcctctccctttctcaaaggactttacagttcacagagtgccttcctgccctttctcacttggtccccttaggtctctggcacaggaagcagcaggcatcctcacccactttcatggcagagaaaaccaagcttggagtggggtagcttgggatcacacagctagcaaatgatggagtgaagattccagtccaggtcttctggctgcatgtccagtgctctgtcagtaaaatcctggctgttaagggccaccctgagacagaggcaaaccccagtttacacccccccagtgcaggaagtggttttcgagggcagatgcagagcccggcatccgtggtggctgtgatgaatcatcggagtgagagctgcaggttgtccctgggtcagcaaacctggctgctcagtgagtagctgtgtgatgttggacaagtcactttcagcagcccaccactaccctcaacccaacatccggtgggcatctggggcccaggagccaaagctggtatgagtgtgaactctgggtgtcatagctgccatccctccttagcctattctgagctctggattggatttgggagaggatttgattaggtcctaaacagtgactccatttagagggcctggttcatttcctgtgtgcttacagcagatgagacatgggcagaattaacctggtccagccaagccaaagaagtgatggatgggaaagacacagacccccaccttgggagggtggggcagtggcttccagcactctagacccaaggccctgggtgagcaagctggtcttcctggggcgccctggctggattcttgttacttcagctgttgcaacagctgtctcactgggtccccagctgcctgtacttcctctatcagagcagtccccatgctccttcaaactagttgtctaacctctgttttttctacttaactgagggcagagattgtgtctgacttgttccctgccgtcctcctagtacctacctcagtgcttggagaatgcatgaatgtatgcgtgccccagtcctccctgccatccacacatcctgcccacattccccagagcagctttgacacagcacagctctgcctgtggcatttcgttgctcacagggcaaatcccatgcccaccatgtgttctgcaacctccccctcatctttgcctcccctcctgccctaattttctcctacacttgccaccctcccacccctgggtttctcgggtttcctataattgctccggagctcccgtcaaaccacttcccaccccagctctcccaagaacaggggccttaccaaacctgcacgcagtccctgttcatacagacctgcctgggagcacagaaagaaccatgagctctgggccctgttcgccagcatctgctgatgtgggatgcacccaggtgcggggcctcaggcagcactccaggctgttcctcctccttctacagccctctgaggtccccaaacacttgtgtgtaaggctccaaggaaacagggagagaccctgggcaggagatatgagttctaatcctgcatcagcctctcattcttaggtaattcctttaccctctgggaccccaggtttcttatctctaaaataagaccactgatagctcccattgtatcaaaagcttttccagggccaggcactgtgaggagactcaaatagtcctgtgagtccagtatgatatcactgggctcaattccagatgaggaaacggaggctctgaggtgttgagaggcttggccagagttgcacagctaaaaagtggccccattgggatcaaaatcagcctggctcgggtatctgagcacataaccactgggccctctgagaacccttccatcttggttagtttctcggctgatctctctgggtaggtgccctctgggggcagtacccctgcctgagtggcacttcccctcctggctttgtttggtttggcctcgatttagaacagggttggcagaggcaggctgacttgcatttctggttttgggtttgttgctgcactttccccaaggggtgggcgggctctgactgacagtcaccactgggacaggcctgggccccaccctcaccacccaggaaaggggaaatgcggcccgctccccactcagtgccactctgtgccactccgtgccaggccctgagggcacccggttgctgcttccttccgtctttccccaaggactatcagaggcaggtggctgggccagggggtgggtcggggggaggtctggccatgtggtagggtgataggactgaggggccccagggagctggctgcagggcagtttgtttctcctgatggagaatgctccctggtgggtggggcgatgggctggggactggtttgttcatggggacagagatcagaagtgggcttgagaagaacagggccagaaggcctggactctggccccagcctagcccctaatttgtgcagggtggctttgggcaagtcactaagtcactgtctagactgggccctcagccttcctgtctacccaatggagggtctttctgtccacctgggaacagcctgataggactgaagcacagcccttagtttccagatgagaattctggactggaggccctgacattacaattgccaacactgactctggtgtttggcaaaatttggtgtatgtgggaaacacgtgcctctggttgaggtccttaacttcagaatttccctctagatcaatgctttttaaagcactaactccaacaccaccatcttctgtaggagctttcgagctttccagcttttccagcatacgctcctgatctgttactcaggcatgctggttatcccatttcatacgtggacaccttgaggcctaaaggttggtgactggctctacctgacacctctgtgtgattctaggttgccccttgctcctctctgggcctcagcctttctgtctatgcagtggggatttcggatcgctgttgtttcagagtctgaggctatgaggtctgagagggcccttgtgtggagtcacctctgagctgcaggcaggatttccagggcaagaaggccacagcatcagcaggcacctgtctttggcctgtgagccatagcctaaggcgtgcccttcccgaccttggccagatcacgctagagtcctccaaggcctcccctcccttgcccagccaccttctctgctctgcagggctccactttcactttcacactcccaggctgtggctcttacccgtgccgagctttcacatccgctcacatctgtgctcccagatgccagcgtgacccctgacacgtgtgtgcagcagcctgcagctgccccaagccatggctgaacactgactcccagctgtggggcttcaccattacagactccccagggcttcaaagacttctcagcttcgagcatggcttttggctgtcagggcagctgtacaatagtgggtaagtcaccggcctttgggctcagttttctcatccatcaaatggacattaatgatttctacaatgagagctcttaacccatgttctgggggtacttacccctgaagttttctgccagtgtgcgcgtgtgcccgcaggtgcacacattcccaagcatctgttcagttcccgagtatgggtgaggtctttccctttcattagttctcagcagctatggcttcttgaagacagaacctgggctctaaataaatagttccagctccggcattcctggtccttgactgggaggggcccaccccagacttgagaactgcctccctgtgtggttgtggcaccatggacactcctgactttctcggggccccaatcttctggtgacatagctgctattcagactttcattaagagaaatgtttttctctttgcacatgaaatctactgtcgaaactcagcaaaaccccctaggatcccgagggttgtgtgtgaggcaggagatgctgtgttttttgaggaatccctgagcttcctccaagcagtttaaaaatccctgggtgggtgattcttcagggaggttccgtgtgtctgcgacatctggtgagtccaggtgtggacaatattttaaagttccggtttcattccagtttaatagtttcaaaaagatacttaagcgttcagagcacattcttgtttgaatgactcattaggattttttaaacttgagttcaggtagaagacaccctgggctgggttcagtgactgccctggcttggttctggtccataagcagagactgcctggttctcctttatccccagaggcaactttgaccctgtttccttttctgtaaaatggggacagtgatgcttcttttatagggttgtcgggaaggccacataagagagtggggtcaagctggcctggcacctgccaaagcaggagctagatagatagtggttatctctccctcttctcctataaatgaccagctgtgtttttgatggagcagaaagttcaagcaagaagacagggtgagaattgttacccagctaagtcaaaggggctttgggggttccatctggcacctcagctttcagactgggggcccggggttcaggccactgcctgatttcatgtcagctcatgcatggtgtctggcatcttggagcctcctcttctgaactgttcttgttttctttttgtttcccagatgtttgagacggaggcagatgagaagagggagatggccttggaggaagggaaggggcctggtgccgaggattccccacccagcaaggagccctctcctggccaggagcttcctccaggacaagaccttccacccaacaaggactccccttctgggcaggaacccgctcccagccaagaaccactgtccagcaaagactcagctacctctgaaggatcccctccaggcccagatgctccgcccagcaaggatgtgccaccatgccaggaaccccctccagcccaagacctctcaccctgccaggacctacctgctggtcaagaacccctgcctcaccaggaccctctactcaccaaagacctccctgccatccaggaatcccccacccgggaccttccaccctgtcaagatctgcctcctagccaggtctccctgccagccaaggcccttactgaggacaccatgagctccggggacctactagcagctactggggacccacctgcggcccccaggccagccttcgtgatccctgaggtccggctggatagcacctacagccagaaggcaggggcagagcagggctgctcgggagatgaggaggatgcagaagaggccgaggaggtggaggagggggaggaaggggaggaggacgaggatgaggacaccagcgatgacaactacggagagcgcagtgaggccaagcgcagcagcatgatcgagacgggccagggggctgagggtggcctctcactgcgtgtgcagaactcgctgcggcgccggacgcacagcgagggcagcctgctgcaggagccccgagggccctgctttgcctccgacaccaccttgcactgctcagacggtgagggcgccgcctccacctggggcatgccttcgcccagcaccctcaagaaagagctgggccgcaatggtggctccatgcaccacctttccctcttcttcacaggacacaggaaggtgagaaagctaaagggggagggagaaggatacatgcaatgtggggagggctggcccaggggctgcagggaatgagaagtcaccatgttccacccccactatcctggcagcctcccagcgaactttccacctgttggacagaagataaaactgaggcccaatgggaccaagaaggcagagcatggacttaaacacatgactttaggattccagatgctgtgttcttatagctccactggtccccacagaaagcagagcaggtgtagcttagcccaggccattgtgtatttggatttaaaagatctgagatagtagctggagaaatagagttacagcctagccagactagaaatccatcagccagtcacaatgacaacacacatttattccgtgtccacattatcctaagcagtttacattaactcattaactctcacaacagccctttgaagtagatagtatttttgtgcccattttacagcagaggaaaccgaggcaaagagaggttatctaacttgctccaggttacacagtgtatcagtgtctgaactagaattagaatctggttccagggccagtgctcttaaccaaccaccacaccgtttgcctctcgtgaatatttatatgtagatgaataagtatttatggatttcctgctgtgtaccaggccctgcgctctgcaacatggcaggagccacagaagtgtgtgaggctggtctcaacctgagagaaataagttaactgtgtgagccttgaaagtggcctaacagtgaacagattgcgccatgatcttgaagcctaccagctagtttgggtctgggctctgtttcttactatgtggctttggttgagtcactcaactcctctgagccatagttttcttctctgaaaagtaggggttaatagcactcacatcccagaatggttgaggatgaatggaagaggctggtgcctgataacactagccgcttgagaggcggccctcagggaatgctgggccccactccttctcttgaaatgcaacagccagtgcaaggtgttggtgtgaggctaggtgagtaggggtgctcagtgcccatggagcacaactgactcagagatctagaacttcaggaggacagaccccagggcctaaagccatcagggaaagcttctggaggaagatacctctcagcttggccttgaaggatgaacaggattagaataaacagagaggtagaggcaagcattctttggctagagcagagcattcctaaagggcagatgcctggcacaggtgctgctattcctccctccaacccatggcagacatcattaatggattccagcatacttcctcaccaagttgggacatgtcctcagaagcctgcttagcttcttagccactagcaagaaggcagacttaccttctggggagatgccttctgctgaaagctagtcattctgacagggcaggctggggccctccagaaaagggtcttgaactttggccttggaactaaatctccgtttcctcatctgtaagcgtgtgtggttctcacactgtggtgtgctccggaatcaccaaggggaggtaattaatatgtgattcctagtccccatacccagaactctggaatcagaatctctaggggtggtgcccagaccctatattttaaacatgccccgagggatcatgatcttgccaaagtttgaatatcaccatcttaggccatttcttgatggtttctacaggagagagtccggaacgctgtccttccaaggcaaggcctcaggctcattcagatcaggcctggccactcctctttggagggcggttgaggcccacctgccttgggcttcccaatcctgattcccccactacacccttcccagttctattcccctcaccacacttgctccaataaaactatttatatacagataaattcacacacattcatatgtatgcatttatctaattccccagctcagttgacctcggctcctattttgggacacatactcctgcctgggagtctagcaggcctggaccagctctctcttgtctcagcttcctcctttgggtgcccaaggttcccactggcaccctcccctgtcccaccaacttttagccggtcacttcctttcttgggtttgagtggctgagctggcagagacatcagaggctgcccccagcctggtggtggccacccttccatgtggcttccacacaccagttcctgagccctttgccattcacatcctgccctcttccaccagtagcttcagtaggaaacttgtcaagaggagatgaagccccggatgggacaaacaccgtggtctagctccatctcttactggtactgggccttgggcaagtccctgcccctctgtgagccacagtttcctccttggtgaaatgggtatggtaataatgcctccttcctagggttgctgggaaaattaaatagcttaacacaggtaaaacatttagggcagtacctggcgctcagcacctggtgggtgctgcataaatggtaatcatgttatgtggagggggagggggagaagagcagtaaccagggtagtactggctgtgccgccattcgaagtaccaccagaccccatttctcaccttcctgacactgctgcaaagtggacaggcacttggcttacagtgggaggctgaggctagtgagagatattttgtccccagccacacagcagcaagtgatgatggcactggacaaggcctcaccattgtctagtcagtcctctgtggctctgccctagactctgagacctcatgctgatgaggggccgggggtgggggactggcagagggacagtggcaggttcccccatgacttctatcttcctggctttggcctggctcttctgggagggtcccctgatgctgatgggccactattcctaggcaatgccaggcaagaggtgaagaggggaggggtgaagtgttcaggctgtggagtcagacagacccaggttcaagtctcagctctgcctcctcctccctggctctgagaccttggccaagttgcttctttctctgagcttcggttttctcttattaatggaacacggagtcccccgggagttgtcccaagggttccagggcgcagtacgtagaaagcttgggctggtcatttgtgctgctgtgcggataagctgaggctgcccagagtacatgctgcctgccacagggtgacattcagtctcgacgttgtctccggtccacacccctgttatcctgccctcttatgtgctgagcaatttctactgtgagtaggaatgtcagaacaggcagacctcagagatagtctgctcgaccatggtgatctcacagatgggctgactgagtccagagagggagagccccctgcccccactccccgccatggttctccagctggccatcccctgggtgtggcgccctgtgctgagttgagtggtctcatggtgccccctgccgccagacccctgccttcctggctgctccctggaggccctgcagagcagatcacaggccttcttcctggggagtcaaggaagccccggagaataattgtgtttgggtccaggatgctgccattgaattctagtccagcctatctggctcagcacagagggtcatgggctattctttgacagtgaggagaccacaggctgcagcccttccctggccctgcttccttcctcccctgcaggggactggcctgggcagaggtggtccacagagggtgccagccctgtttcactaagctcccacgtaggtcagagatcagacgagaggaccccaaaaatgccttccagctccaagacgataataccttcaagcctcctatttttaaaaagcctaaagaattatttcggatgtgtaaacaagtaagtatagagtttaaatccactgtttccacgtggttccatggggcctgccagcctgggctggatcggagagggcagccatggatggccagggagccccagaagtccgaccaggaccaatagggaaaccagctgagccctgctcacagacgagcgctcagtcactagtgggctctggacccagaccacagttctctgctacttgttagttcagagagcccaggccagttatcaaactgccctgggcatctgtttcctcagctgcacactgaggggaaatatcagtaactagctcttagaatcgttgccaagattaaatgagataaagtatgttaaaacactttggcccggcacctgacatgtagtgaacgctcaataaataatggcaaaacccatgctagctgagagtacttgctcactgctgtgtgttgggcgctgtgctgagcacgtccccgtgttaacttacataatcctcaccacagccctttgagggaagtccggttattacccgcattttacaaataaggaaactgaggcacagagagggatgtaactgagctaaggtcaatgagctaataaatgattgagctaagcttcaaatccaggcaattaaaaatctacactcttaatcattactataattacagttataattacagtaagaattataattattgttccaagaggtggtgagctcctagtccctggaggtggctggatgaggctgggcagggcccagggattctgcctggagtgaaggaagggctgtatggtcctggactcacctccatctgcttttcagctggacaaggtcacatagtgagacagtggggagaagatggaaaggagaatccctttggagggcctttgcagactaggccctgggcaggcattgatgcagctgtgggaggggagggaagagtctgaggagccactctggccccctccaaggtcagaggccaaagcctccctgcagctatggtgagtccctagggctgggaatcagaacccgattttttcacctcaatttctccttggctcacaggctctttttggtgctggggtttccccagcagcccagggggctgactcctagggccagagctgcccagcccctctgtcaggctgctaggcttgggtcagtccctgctgaagacactctcctccccacagtggaaggaagagcccatttcccagcagcgcagaggctgaggatggcggctgggtgggagtggtccccaggcccattgtgtggagccgataaagtacggaagctgaggttagaatgggaggaagcccagggcccgagggctctttcccacgggtgggggccttgggcatggccttgccaggccagcatgagtgcagcctgtatgtgcactgaagggtgccctgaatggtgacagtggtaacactcactgggcaatgaccactggttactgaggttagcgtgggtgccaggactgggccttggggtccagagtttatcctggtgaaccttccatcagccctgtgaagtggctgtcactatgcctaagccatagctaaaaaaatggaagccgagaggctaggaaacttacccaaagttggtgaaagcaggatttatatccaggtctggttccaaacacttgctctgaaatcacacaccatacggtgtgtgcctctgtgtgcacgtacacacatgtatgtttacaactctggtggggcagcattctcaggaaggaggcagcacttcccgagtctttcacaggaaacattaaaatgtgttctgaccttgcatttttgagtagcagcatcctctggtggagaaacacaggccttgaattgaggcagattccagctctgtcacttacatgctgggtctccttggggaagtgacttaaattctctgagcctctatttactttataggtttattgtgaggtttaatgagatagtatctgaattatgccccatccagggtctggcctatagtatgagctaaatgaaggtgtaattcatccatccatccactcatccactccttcatccatccacccacccacccacccatccatctattcacccatgcattcatctaccatccacccacccacccacccatccatctattcacccatgcattcatatatccatccactcatccatccatccacccatccatccatctatccacccacccacccatatattcatccatccatccatccatccactcatctatccatccacctatccacatatccatccatccatccatccatccatccatccatccatccatccatgcaggtgggagactcacaaaagcatcccccgaggaaggaattgcacatggagatgaagaccttctgttggttggaaggcagagttgaggaggttgctgaagtaggggccaggctggagagataactgaaggaataactgaatggaactttctgccctgatcctaagatggtagatccagtcgtgttacggagtttgaatgttatcccgagggcactagggagccatggaaagctataaggcaagagaggtgcactcaggcctgtgtaatgatttattttatacactgctgaccatctcaggtctcctttgaacttcagaatcctgacttaatcattatgatcctgattttagaaattaaggaatagaggcttagagaggggcagggattggcctagtgacacagcagaagccctgccctctcacctgctcactgcctgcaatgaagcctctgtcctgagtgccagccgtctggcttctccccagtgagctggggacctgactgtcccaggaggagatccctgtggccggagagtctgccaggccgattccacttcatggccaggctgttcccagcagtggggtttccctccctcacctgtgtgccgcgggtgggggctttggggatggaaggggctggtggcagggaatgttgggtctctgagcctctgtttacttaggcaggagttcctgggtgcccagactgcatcgtgtctgtcttctctccgcagatgagcggggctgacaccgttggggatgatgacgaagcctcccggaagagaaagagcaaaaacctgtacgttgggaagatccctggcttctgcgctcctcttcctcccttgccccagggcttgtctctcctctaggggtccaggtggggagaagaggttgtgcctggtcccgcccacaaccccagacagacaccaaggaaaaactggatcttggaactttgcagtgaccccaaagtggggtcacctgggtcctgagcattctctccaagtgaggcaaagtgctgattcagtacccggaagccacagtgaaccagaagcaaccagcccgtttgccctggctttagcccagcttctgagccaagcagggaccaagtgacttcaacaactcctttgctccctctgggcccaagagtgacctgagaaggggtggaactgacagtcattggctcctctttctcttcctgagctcctgaatgctaatagtctcaggcattgccaggagggggcgctgctggcccagctgccgaatcccgcactcgccaagcctttctggccacactcaggccttcttatactatagggtgtttgttagaggtgtcaatgaaaaagatgtgtgtgtgggttctcaggtcttcttctacccccaggcctaagaccctggagactcgggggaggtatagggaggaggcagtggggtgcatgcacagtgacacctccagaggaagcccctccccaccaggtcctgtagcacccaccactaggcaggaattgggctatagggaggagcctcctgcaaccctcttctctggccttgaccgtgggtggggtccactaccctagaaagccttcctcaccccagctgccttgacctctccagctttctgcagcaactgttggcttctcttactccacagccaattgcattttcttagcaaggtgaaatgcataaaccaaaacagtcccttgcaccaaccatcttcacttaaccttttgtaggatgagagaggatccagggggtgccaggactgttgaatgtggtgctggaagtgggaggtgtagggaagcagtgtgtggcgcagagggcaggcatcccgggtgctggagcagccctgtctagcctcctttcaatgtaggtgctgccttttgaattgcctgaagcccacactttttttttttggagacagagtctccttctgtcacccaggctggagtgcgatcttggcttgctgcaacctccgcctcccaagttcaagcagttcttgtccctcagcctcccaagtagctgcgattacaggtgtgtgccatcacacccagcaaattttttttgtacttttagtagagatgggggttttgccatgttggccaggctgttctcaaactcctggcctcaagtgatcttcccgcctcggcctcccaaagtgctgggattacagacatgagccaccatgcctggcctctgaaggtcatactcttaaaagcttagacgaagagtcttagaacatctacggtaataataagaataaccattaatgtttattatgccccgcactgttctgtgtgtatttcatatgtaatctaatttaatctttaccactacttttattttccgttctgttctttcttattgaccttacccttattttacacgtgaataaactactgtgcaaagaggctaagttacatggcaagaaagtggtggggttgggacctggagacctggcctgctggcttctgtttgaggaaacagcttgacagagaaaaaaccttgataggaaacttgagagatcaggaaacgtgtcaaagggcacacagctggtaactgctggagctgggatttgaacccaagactagctccagagcctgggatcagcctcccctgcaggactctccttcattagacagggtgtctaggtcttagtgccattttaagcttgaatagcatcagaagtataaatgcttcaaacttaccaaacccccttgaaagtttaattattaaatttcttttgcacgtctttagttatgtgatttttgaataatcaatttttcattttcatttttggtttgagtcagcattttccatctttgggaggatggagaccaaaacttaaagtgaaacatttattattcgaaaatcacaaaaccatgcacacaacattaaataattaaactttaaaatggtgtttttgtaagtttataggacttgtacttctgaagttattcaggcttaaaactactaagatgttggggtcctgctgtatattcatgactggatgtcgccaatgcaggtgactgaggctgagaggccggctggcaggagccattctctgggaggtgccctgtacagggggtctagggaaaagaggggcgaacatgagcaagaggcatttaactcctttcttgccagcagtttcacccagtgctgaattctgctgcctccttggggaccggcaaggctaaaaatggttcttggctaaaaatagccagtcctgccaccccggtggtgggcagtgcctcccctggctccctccttccctttcagcaatttgctgacttgtcccccaccccccaccactgtctccctgctgccatggtaacgaggaggccagtcacaaatagctgggactggcttcctgccggggcggccccagaggctgtcccttgcagacacatgcccctttcacggctccctctcagggttggccagaaggaatttttttttccgctccccctcctggtccctcccatttcctggctcctcctgtctgagtcccagccccggcttgtgcctgggagtccagtcatcaggccaggattccagagagcgtgtgtggctgcagcctgcaccgttgctgcccgctgcccaggacgcggggtgggggacaggagccagagtggtgcctcctacagaccaatctgcggccccaaggtggggggccctacagagatgctccgaggcatgtacctcactcgcaacgggaacctgcagaggcgacacacgatgaaggagtaggtgccctcgacccagctctcccgactctggatttgcaggggcgagtgggccaggctgagcaaccctcttttctgcttctgtccccagagccaaggacatgaagaacaagctggggatcttcagacggcggaatgagtcccctggagcccctcccgcgggcaaggcagacaaaatgatgaagtcattcaagtaggtcctccctggcaccctgggaccctttggggaactcactggctccccggggagtaggactgagtggtagggttgaggggaaggggcttgccggcttgatccagctctgggggagacaggctttcacagagggagctgggtacctggcaagcagctaccctcacagggagcagctgccctagggggaaggctaggtggggtggagatgggggctggaagggaccctggccccgggaaagagggtgggcctccttcctgggcgccccagctgggctcagctgcagactgggcccagggcagtaaacaaaggccgcctggcccagcttcccccaaggttcccaagcctctcagtgccctcactgtgtttcctccctcacccctcaggcccacctcagaggaagccctcaagtggggcgagtccttggagaagctgctggttcacaaatgtaagttgggcctgcctgcccactccctgtgccctctctccctctccccttcgcccccatccagaccctgtgtagctggtgctagagaggccgccttccctctcctcggccgtcagggtgtccttgctgttgcggaggggctgagcccaagctgaggcccttggtctggccttggagccagcttctgccagcccctccccgtccatgtgagctggcactgcctgccggaggcccgtgggacctgtgtgctcagatccatattcccagaataagaataaacatttctacgtactgagggctttcacggcgccaaatgtgcctgccatctcatgggcagggtcccatcggctcctcccagggctccgggagacagaatcgatagtccccatttcacagatgaagacactgaggcatagagagggggagaccccactgagaccctgaaagaggcagtggcagggctggggccacatcccagggctcctggctgtcggggacgggcattgtactcagctcccagcacgcccatctttaaagtcctgtaggggtaagctgaggcatcttaagggcaggagaggctgagtttgcctcttaccccaggatccgttctcctcacagacgggttagcagtgttccaagccttccttcgcactgagttcagtgaggagaatctggagttctggttggcttgtgaggacttcaagaaggtcaagtcacagtccaagatggcatccaaggccaagaagatctttgctgaatacatcgcgatccaggcatgcaaggaggtaggacctcagggcagaccctccgctcctccaatccccagggcccagtggcccttcagctgcaaggtggcagccagcagcacaggaaggggagaggccagaatgactccatgagcccaggtacccagcagggaagatgcaagctaggatcaggggaagaacagaatcccagttagtaataaaaatggccaccaccaaggcactgccgcatgccaggcatgtgctgagccctttatgtatgcgttctcatgtttaatccacacaacaacctgtgaaacgaagagacaggctgggcacagtggctcatgcctgtaatcccagcactttgggaagccgagccaggcggatcacttgaggtcaggagttcgagaccagcctggccaacagggcgaaaccccatctctactaaaattacaaaattagccaggtgtggtgatgggcgcctgtggtcccagctactcgggaggctgaggcaggataatcgcttgaacccgggaggcggaggttgcagtgagccgagatcgcaccactgcactccagcctgagtgacagagacaaatcataattgctcccatctattgagtgcctactgtgtgccaggcactatgcgcaaagcacattatatggatgatcttgcttggttttcacgctttgaggaatgtactattattcctagctggtagataagacaactgaagctcaccgcacttaagtaatttgcttcaagtcacacacccaggtgtggcactgctaggatttgaacccaggaagcctaaccctcagggtggtattttcagccttataaatgctgccagccctacaggaaatgactgagccaggacttgaatcctctggtctgagggtctctacttcagatgaaccttaagatgtggggcaaaggggcttggaggtgagaggctggatgggtcccttccaggcacatgggccctagggtcagtccccagcaggcagccctgaccatgtccccctctgcctccccaggtcaacctggactcctacacgcgggagcacaccaaggacaacctgcagagcgtcacgcggggctgcttcgacctggcacagaagcgcatcttcgggctcatggaaaaggactcgtaccctcgctttctccgttctgacctctacctggaccttattaaccagaagaagatgagtcccccgctttaggggccactggagtcgagctcagcgttcacaccaggcgggctgggtcccctgcccacctgcctccctgccccctgtgacggagggggcaagcaagcccccagaggctgtgtctctggacagacggatagacatacggaagcgaggcctggaccaagagaggcccaggctactggaggagtagaaggatgggccccgtggggtccccactgccccggtacgagggggcccaagaccctggcaggtcaggggccctggccaagccagatctggagctgctgctccctgctgcggagaccgcggaggcttcgcgttgaccaagttccttaaagaactggctgatggggcaggaggtccaggcctgggctctcgggccctcctagagggccattggagcttgcagctcagacccccactttgagttttatttatttaaatagtagttggatgcttggcacgtcgtcctgtaataggaaacccttgcctcatcagttttcctgatttacaagtgcaatattttagccaatgccttgggagaagctgccatgcaaaggtggacaccattctccagcttcaggggatatgctcgtcccgggcaccggtggcaggcagctggccttctggactaaggcagcctggggggacactgcagtctggctacacacagagatctggcaccccctgggtggagtgtccctcgggggctttgggaaagcatggcaccctcagaccacacagtagccaagttctggagcaaataaaaggcctgtgttatttcttgttcttgaccctt

SEQ ID NO: 111 - DNA, 155630 bp, Homo sapiens
agaaagcccacgttggccgctgcggggagcgcggcgtggagaggcgggagaccgaattccggcgccgccgccgcggccgctgctcggtgcactagcccccttccttcccatcctttctgcgagcgggtttgctgggcagccgggcgaccgccgaacggaaagcaagatcctcgccgcctccgcttgaggaggcgtgcggcgcgcggagattttgagtgggagcgacggtgcccgagagctcaggggcgcggagttcgtgagcgagaaggaagttaaacctcgcggaatagactggcatttcgggacgccttgtcgccgcagcctgggccctgcaacggggtaaacttcatggtggccctgcgatctggggaggggcgtgcgccacggtgatgccgggcatctcccgcagctcgtgagcggccccgctccccgctgccccgggtcccactcagtcgccagggagagcgcggggcagcgcacgtgtgcggccagcgaggcccagagtgaccgcgccgcgactcgcaggagccagggcgcaggctgcagtgcagcccggactcagacgcacctggcctggaccgcgcgcctctagagacctgcgcgaggctgtgaggctccccttcctcccctccaagcggttctcctggtgatcgccccttcgccacctctctagcctgggcaactgggggcgccccggacgaccatgagagataaggactgagggccaggaaggggaagcgagcccgccgagaggtggcggggactgctcacgccaagggccacagcggccgcgctccggcctcgctccgccgctccacgcctcgcgggatccgcgggggcagcccggccgggcggggatgccggggctggggcggagggcgcagtggctgtgctggtggtgggggctgctgtgcagctgctgcgggcccccgccgctgcggccgcccttgcccgctgccgcggccgccgccgccggggggcagctgctgggggacggcgggagccccggccgcacggagcagccgccgccgtcgccgcagtcctcctcgggcttcctgtaccggcggctcaagacgcaggagaagcgggagatgcagaaggagatcttgtcggtgctggggctcccgcaccggccccggcccctgcacggcctccaacagccgcagcccccggcgctccggcagcaggaggagcagcagcagcagcagcagctgcctcgcggagagccccctcccgggcgactgaagtccgcgcccctcttcatgctggatctgtacaacgccctgtccgccgacaacgacgaggacggggcgtcggagggggagaggcagcagtcctggccccacgaagcagccagctcgtcccagcgtcggcagccgcccccgggcgccgcgcacccgctcaaccgcaagagccttctggcccccggatctggcagcggcggcgcgtccccactgaccagcgcgcaggacagcgccttcctcaacgacgcggacatggtcatgagctttgtgaacctgggtaaggatttggggtaacgtaatgacgagaacatttcccccttttcagtgtcccgggcccaggggatggagtgagggggtggaggagctcccggcgcgcgggtcccgcctggtgcgccagagaacgcggggacaggcaggctgtgctcccgccacctgcgcggcggtgggcggcacatgcgctcccccgcgccgcgggcagggctgcgcgccgaggcccccagaggcggctggccggccgggccgcggggctccgggagcgctgtccccagcgggcgtgtatttgcggactccctgagcacgttccgcgctttttttcacttctgcccagctctggccaggttaactcaactgcagcaggagagtccagcccgagtgtggccatcctgggaagagggctcttcagtacgattttcccctctaaactgccgccttttgccccctaacttggagtgcagttttcccaccgagacttttagggaatccgacagcggctgggaactttgaaaacttggcatgagtatgtttagaggtatccacggcactaggggaggttgcagagggaagtcccaaaaggaccgcggaaggcgctcggatcccggccgggcggggctcgcttctgtttggggcgggatgaaagctcaactggggtaatccatcctgtgccccggctcacatgcccttggccattgtccccaaaggctgaacctttgatcaatgcagcccaagctgcacgggcagagaaagggtgcggggtaggggccggggttgggcgctgagctcctctgaaccggttgccaggcaacagaatggaaattcacgggcggctaaatggagctccgccacaaatgttctgtggcaaacccggacccagtcacatcgccctttctcccccctcccaccccactgagttttctcatctgtaaatgagaagggtgcagagaagactcttttcttcggagtcagtgcctccggtttgcactgcttttcattcataagctgacttagtttagcgcagacataggatggagggacgcgctgtcagcggacagatcatgggtgcactggctacgcccgggatggttgcagctgcgcggcggggtggggcttcacgggcctccttcccatgtgagacggtggttgtgcccaggccctgaagtgggtgagcagacactcgccaaaggagcacacgggtctcccagccacgtcaaagacgctcatcttttaacggcattacttactggaatgattcccgcgtagactatctgggtgatttctttaccagcctatctatgattcccaactccactgagctttgagggagagaacatggggggtaagagccaagggagggtgtggaggcagggcgattggcatccaagtggtgcagaaatcctcctgggaaattcgtgaaacagaatctcacaggagtccaggctcagggcctgccaatctggctgcttgcactgcccggggttctgattggacaagaattttcacaatttattggaaccaaatccaaggttgagccacctccaggaagcattctaaggaaattctcatgccagtcaataaaatttgtagtgggtgggggccagggtggcagaggaccagcgctgttccttattctaacttttctgctgcttctgacttagtaaattcctccccttgctctcttcctctcctctccttccaccctcaccccccgcccccaccccgcctccaggtttcctggcagctctggggaaatgttttattgcctcttgggggtagtcctaacctggacaaaggggaggaagactggcgctcctggctacttcacagagaatcgtgttacagtccctgggaaaacaattcctgggcttgaaccgaggttctcagcattagctgccctgtagtatcacccgggggacttagagttctagggttattagggccgcttcgtgggcccagatcagttaggtcagaatcttttgagggtggggcacaggcatcattttttttaagtaccttaggtttttctaatatgctaccgtggtcaggaaacactggcacaggagatcccaatgtctgaaggaaatggatacattgtcccagtaagagatgaagagcaaagctttcaaacattgctacacattagaatcacgtgggtgttacgtgggaggtaggggggaacgccttaaaaaaacccagatgcccaggtggcactccatatcaaatcagaatgtgtggaggtggaaaccaggtagcagtatttttttgttcaaaaataaagaggatctcccaacgttgcccaggctggactcaaaactcctggcctcaagcaatccccctgcctcagcctcctgagttgctgggaagatagaagtgtgccaccatgcccagcagtgtcattgttttgtcaagatctcaggtgatgtcagtgtttggaaaccactgccttagatggtatttgaaatttcaagagctgggcctaaggcgaatttgtaaagtatagtcatatttactgtatttagtgaccctccaaattccccttattccttgcttctctgacttttcgtgggctacagggacacactgcctctgagtcacactgcttaaagctggctgtcagctaatccttgctagggtgatggtttaacatagtatctccctagggatattgacatttttcgtaaaggattttgaaagatctaaaaaaatcccctaaaaatttttaagagaactcacccagtagtgcaattccaggccccaagacaggctgacacagaactgaaagagaattctaggatgggaattctatcccaagcccctcatattcctatcactgggctccttgtacaagttatagctactgtaggtccacttctggactctatactgatagtgtgaagagaaaaccttttgcgggtaagtagaatccaagcagcaagccatgccacctgccaatgaagcaattctatttcatcttaatccatgtagcaataggaaaggggtatttcatcatcagaggctagaatggggtaaaatctgattgccatgactctgaacataggaaggacagttcatttgaacaaagttattgcgtaccaatgttggattctctatatagggatactagagaattacagatttcctaattgctgtcaatgccatgttaactgccacattacctgactcatctattaaagaatctacagaaagataaacatgacagcgctgcgttttaaagtacgcttatacctactaggttaagtaaattacacactggaagtacaagggaaagtattacatagttgtaaacatccgacttccctgggactgggggaataatttactcatgaaatacatttgaaacaccccgagccttgtaagccagccggactatcaggaagtgtgaatcaacaggataaatttctctctcatagcgcaagtgctggtcatccaaccagctcattgttgtttatgttgactgtttcaaactctttctgggtgaataggctgggatgtgtcaccttctaaatgctaaccgtctgctgcctgggctgctggtgtgcagagtgcctgggtgagcgagctcgtgaacttgcattcactcagggccacagatgccattttctatttgttttctaatgctaaaaatgtcttggcagcctagtcagcatccctgccaatttggtgaccttggagaggtatccttcaggtcttagcttaaaattcacctaagagagaccttctctgccactctatataaactggtcatgcctccatcccacccacttctgtaccatgacagcactctgcttatttccttccttgtacttatcacaagtttttcttttttcttgttaaatttgcttactcatttgtttgtctcccctgtaggatgtcagcctccaaaggcggaaaccacgctaacccaccacagtagcccaagtgcctaacataatgctgaccacatggaagatgctttgaaaaggctgaattagtgaacatatagacatagcccatgcttcaaattcatatttcactgatttggaagatttgattatttagaaagggtatacctgatttttattgagtaaaatgtttacagtgaagacatttaggacagggaggttcacagtatttgaggtaaatcatcgtgctttattaatacaccttttttattagtcacccatatgtatattaatttgtaatatgcattacatttgagagtagtaaaaacatttaattaaatatctgcatttcagatttcacttgtttatttgaattcacgaggtatttatctccaaatgctaggattaaatggcaatttaaaaaactcaaattgtgttcagaaaagggaatcagtatatattagtacaagcagcaagaaacttgtgctaaaaatactggcaattttctgaacaaaattactcttgggaaacataaataagaagaaaaatggaatactccctacttgtatttgtaactagatataatgcgctatctctttctcctaaacatagcatcagtagtactgtttttcatttaagctacctgtacttaagaagatttttgttagcagaaaataaatccatgcctgcaagctactcacagcaaaaacagtttggagaatttggttgcaagagtgtgattcaaagaagcagtagatgttcttctaaagagattacaaagagtaaatttgaaattcagtggcatttcaacaaaaaaaagttgtacaaagtgttcttaaactaagatcaaagggcaagcagatactattgttcagacctcagatggtgtttcctctgggtgtccttctaagaatgggtataaatcctttttaaatgtgctgaatcatggttagttcctctatttgagagcttacctctgatcagcttggaggagggcttccctgggataagaatctgtttaaatacaaaaacaatgctcagtgcttgctttagcatataatttgttgcctctctgtgtcttcagagagtaactactttatatgttggatttcaaattgatattttacttgactatgaatactggctaaatactggctatcaaatgtagtatatcaaacgtagtatatcaaacgtagcaaactaaaagatagcagctctgctgtctttgcctcactcctatttacgaaggtgagttagacaaggaaaatgaagagggtacaatgtcttgcatcatgaagcagctttctgtaactttttcacaaaccaatccttcactttctgcttcccatcttatatcaaaaatgaactattctagggaatgatttttttttttttttaagacagtatctttttctgtcacccaggctggagtgcagtggcgagatctcggctcactgcaacctctccgtctcctgggttcaatcaattctcctgtgtcagcctccagagtagctgggattacaggtctccgccaccacacctggctaatattttttttttgtatttttagtggagctggggtttcaccatgttggccaggctagtctcaaactcctgacatcaagtgatctgcctgccttggccacccaaagtgctgggattacaggctcacgccactgcgtccggccaggaatgactattgtttaacttagcacaacgtcgttacagttttaatttttctacttcgatctttattctatttttcttcctcttctgttcagaattttagtcattttgccatctttggtgcttccagtagtgggaagaaaagtagacaatattttaattagacaattttgtttttcactagttttcataaatatatgagtaaaaggagtagaaatcaccgcagaaactccctaagataggaatagacaatttaccaaggccccattcacgtaaacagctgttacacattaaccatcctgtccccccctccctaggccacagcataacccagccatgtgcccagcagctgggctgctccagccgcagggtgtcacctggggggcagatatagggcatagctggcatcttctcttgtgttccccgcaaggaaccagtgcattatgttgttcttatttccctgttttcatcacgacagcggagttaactttattcaaatacactttcttttctgatcatacccttaccttctcttcaacaccctcactcccatctctgatccagcttttacccactggaaacgtgtgagtcggaaaacggcactagtctctcctggaatatatgaaagtggtgatagttgtatgaaggggaaggaaagccatcaccacttcggtgaaaattagagttaactctaatttttcagtgccattaacctctgaagtttcgagagtaccagaaattctcagaacctgcattccccctgttcaccttttactacaagcattagaaatcagtaacacattgtgggtcactgaaatttatcagattttgtgttcagtcactagtgttttgaagattttgttgtctatactttttttccaatgtgaatatgtagtatttcagcaccctatgcataaagttaagggtctgaagccaggctgggaacacagctaccatccctaacatggtttttctggggacacgtatgccccagcaacagaaaacccatttggggtttattggttaaatgagtttgggataactggtgaatgtatgttcgccatagatcatagaatttagagcttgaaaagttctcgcatatcatctaatctgtttgttcgcagttaaatttgttagatgttttcaccaccattttctctttactgctgttacctcttaagattgagggacaatccatgaaaacacacagagatcctagtgcatcagagcaatagggctgttggccaggctggagtggataatgaaggagaaattacaaaagcaggcaagagcacaaccctggaagagccgaggaaacccaaatctggaattgttggggttttctcttagtggatagcatcttctccaagaactctacttttagaaaagaaaatgctatgtatatctataaatgtccaaaggactgttgactccaaagaattgttttctgctccgaaattgagttgaaaaccacgttgctctgagtggcattgttccactgatatccactgattctcttcctgcccttcccatctccattattaaggagattgggaccataatagagatgatatctaaattacatcagttaattccttgatgggtccccacggtctcgttatctcaagcacagtcccagatgactgggtcgaagaatctccttcaaacatttttgcaggatgaggttctggttccaagtgggagagccttcctgactttcagatttataggcatacgcccttgatgactgatcctcctgctggccaggtcaggattgtcctaggcctaaaatgtccttgccacacagtgccgattatatgttcagattgttttcatatcaccaaagagctcagctggccacggggggaagtggagtggagtggattcacagggcgcagaaaacagtgcccctcggaggcagagccccggagcccgctccaccctgacctccgatatccgccacgggccttattatcactctcctgccgcttgccctttcaccgtccagaacgtctgcgtttgttgattgttgttgctgtgtttacagtcctgttggtttcctgtacgtgaacatgggctggaaaaaaaattctgatttgtgtctcagcagagcatgagtgaaccatatcattggtaagagctgattaggccaggagatttcttataatattagccttgcttattctctgagaccagttattttccctccctccttttgaatctatgaattacatttaaatagtccaaagactgagttttgtaaactacaaaattaaggactaaaagtttttacttaattttgatttttattcagattttatttgtagactcccatatcggaataagttaacaacggagaagctgtacattttttagaaagagagggtttttttttaagatcagtttgaggttcacagcaaaactgagcaaaattttgcagagatttcccaggtaccccctgccccacaggtgcacagactcctccattatcacccagcagaatttggtatctttgttgcaattgatgaacttatatggacacatcattgtcacctaaagtctgtagttacatcccggttcactcgtagtgttgcagattctgtggatttggacaaatgtgtaatgatgttatccaccgctatagtatcatgccgaggagttgtgaaactactctgccctacaaatcctctgtggagaagctgtacattaaacaaggaaaaacaagtcaatgaaagtataaaaattcaaaatacgcagagttcggggaaagaattataaaatacctcagttgaagaatattttgtttctggggttttactaaagtggtccctaaggaagtaattttgatagtctatgacaatgtgggatttattttatagtgcttctatgtgttgacaacaaatccatcagaaatctttcttttttctttctttgtttttaagtctaggagtttaaaaatcttttttcctccgcatagtttgactgaggtgtctgtcaccatagtacctagacaatccctcaggcagagatatgagtgattaaatttctccctggcttgtgccctgtttgatccatgctaggcaggatttgggggagtaaaataaagaagcctgaagaatgaacaagaattataggaattttgtgcttgtgaattattaaaatttgggggggttattaggggagaggttaaatatttttcctttctgaaaacttacattaaaacttaatgtgactttagaattgagaaactgacaaaatatcgtactggccctaagggcaggatcagaggactttaaaaggcttcctcaggagagactatttagatcagagtaaaactaaattaacagagactccatcaattcagaggtctttgtaagtgatatatcgaataggcttatttgcctttggactgttttctatgacaaagctacacaggttaatggtaaataaatatgagaatacaataatggagacagaaatgtggtaactgaagagcagttcgtttgagggatattaggggtttgtgtttattcctttacaaatattgtgcaggtgagacatttagtgaattctctccatctctcttcacgtcagttactcattgtagtggggtattactgaattccagctaatttgcccgcccgttatctcccaccctattctgctcccttacagaggaaacctcttaaaaatggggaagagggccgggcgcagtggctcacacctgtaatcccagcactttgggaggccgaggacggtggatcacttgaggtcaggagttcaagaccggcctggccaacatggcaaaaccctgtctctactaaaaatacaaaaactagccaggcgtgggagcacacctgtaatcccagctacttgggaggctgaagcaggagaatcgcttgaacccgggaggcagagatttcagtgagccaggactgcaccactgcactccagccggagtgacaaagcgagactccatctcaaaaaaaaaaaagagcttggggccatggcactgtcactgggcttgagaaattcagccttgtctcataacatctgacttaggatgtcctgtggtttaatacttctctgtgggaggataggtgtttaatggagcaaaaagagaagtgatatccatgggcaggactaaggtgtatgaagggaagagtaagaaagccataggtgcctggagccaaagatatctggagagttgcctttccccccatggagaaaggccatgcatggagcaggcctttgcatttttatggggtctgtttagggcagagccttctaacaccaactcttgatttgttgagattgtttgaccctgttgttatgcatgcacatacctgtcatcgtaggatgatcccacgtagctgcaggggtgaaggaggtatccagtggatgttagagtccctttctgtcttgctttccctttttttttttctcttcttttcctcccattaataaaattggcaactccattgcacttatttccactttcgtatgtgctcttacctatagttttggagcctttgctatggatctagcagagcagattatacacgtccatggagtctgggagttttctaccacagaaatgactcattttcacccactgcaatggttaagtagctggttttcttgacagtgctggaagatgcttatgatcggtttattatagaggaaagagaactggattaatatccaggaggcttgaatttgggctctagttcttagtattattcttttttgtaatattttcttcttttttttttcttcttttttgtaatatcttgttcaagccacttaaccaaatttctaggtctccttccttgtctggaaactgtattggctagatcagcatttttcaaaaagttactacttttccaaaatgttctgcaagaaaaggccgtagaagcactttctattctattcctctctttgaggtttacaaatctttctcctgttaatgccctgacaaggccagaagtaaagaagcctgctaacttggttcagcagagtttgaactgacttttactctctaaccccttttggctgaaacccccttgtgtcagacccaggcctctctgcccccacacccactcctgaaccttctcctgttgtcctcatagatcaggggagggaccctaggaggctgcgtttccagctgctctgctcttctgtggctccagctctctctggtccccatcttatgctagggaccccttggctctcctccctccttcataagagggaacgtggcttcctgcagttgccaatccatgggctgcctcaccacgacctgcttggccgtgtagccctcccgcttctgtgccaccagatccctgcattaaatcccctctgttgtaaactcttgcagaaggttctctgttccaggttggaccctcattgctaaaggctcttaattccctggaacacagttgagaaaccccaggctagataattcccaagacgattctttttaaattttttggtaatgcagcttaatttgacacattgacgtataaggaacagcttaaagtgtacagttcgataaacttagacataggtaggcatggctgcaaccatcatggcagggaagatggtgaacacattctgagctacactttaaagcatctcctgtgctagggaatgaaatcatcactcccaacacacaggaagtgctgtgcaaagtcccatctttcatcgacaccttggctcttcttgcttttctcttacgggctttgtacatccttaagaatggaatttgctgaagatcctcatggcttgttttcttggatcagagaaccatggggtcaaatcttcatagggtcaagcctgctcttggcaactgtgattgacctttaccctatgtctcactttccacattgattttgggaaataataataaaaataggcagacttcttttctaattttggaagcaagtgtctgggggtagttttgcgttgtggtgaccctgtcagcattttgtttctaaagactgtaatttagaagatttgatcctgccggaacacagcacaaagatgcttccctgtgtttctgttttaaatttgggcaatttgggtagggcacaaatccaagaactctaggaaagtagactccaatttacccctgacattttccctatgctcatccttctccaaatattctggaagcttaaatagaaactgcatttttttctgcacaaaaatacaagtactgtatttctttatggccttttgccttaaagaatggctgatgtcacttattatcctattatctcagcaaggcaaatacttacacttttacagctgcagatacataaaagttcttacttttacagtaagaactagtagatagtaagataggggagaatttggaggtttttggagaaaactaatatttagagcaatgttaactgaatgttccaaatagcacccagtcatgtaatagaacagttttgtgaaataactgtcccctacctgcccaccatttggggaggttactctttccttcccactgtcttctctgcccttgtggtctgacttccatccccatccatctgctgaaagtgtttcgttgaaggcagctaatgactgtcctgagtcttcatcctcctttccaaaagccttgatcatgttgacgatgcttttttccctactgggctattttttagcgcttctaaaaaatcctctccttagtttctacaacactgcctgctcactcttggttcctttcctgtcttgaagactgctgctgtatttggggatattttctgaaatacaacaaaagattcagaagggttggcctgtggcatgagacctgcacactgggctgagacaggacacaggcagggagctgggcatagggaggaggtcacacccagttgcaggagtaaagagagaacatgtggccataggtcaggatgatgggcaggtaccaggctcccaggtgacctgccaccaaggctcggtggcctggtggtagctgttgggttcagaaagtcagatgcatctgcagagatgtcccccagctgtgagtgcctcctcacgtgtttgccttctctcttatgacccatctgttcagagcatgcgccaagtgtggtcccatcccagactcatgcagcacagcttttctcaaactttgtgcaacaaccacttgtttttcaaattttttagtttttgtggacccatacttttgggtccacgaaaattcattacaagtgcattcgtagaaaaatgacatggaaaaaaacccaaaatatgttcaaaatcaagcctcaacttttaatcattagattccatttgtagaaagttgtcagtcagcttgctgttaaaccatctaaacactccatttctgtactctcattgcaagctggtaacaaagtttgtggatcagcacagatctattaacaagcagcttcttggaccccaccctgactcgggggatttgggtgtgggaatctgcacttcgacaagcggtgactgaggtttgggaaccacagtgctagttactcaggcttaacttcaatctttgccctctcgcccacatcaagtcagttgccaggcttagtgatcctgcttttgaaatctcttactcccatcttcccatcatcttttccatctatccctaagttccctgcagaaggtctttataatcgttggccttgacttttgcactggtctctctgctgtgaatccctccctgcatccctgacaggctggcttttctgtggtgcaggtgtgatctgttagtcctcctccatcaccttcattggctcctgtggccactagattaagctgatgtctctgaggtccaccctgtccatctcttctactcatctttccatatgctgttatccagccagcacactctgctctgtgattttgcctatttacctggtgaaactgcccactgccacattctcaattctgttttttaaaccccagttcaaatgccatctcgttaagaaaggctttctgaaatttgcttacccatgtgccatggctctttagaagaacatttggggccaaatgacaggggacttgtcctatgcagagaggcatggagcagcattctttattatcattattattattattatttttgtagagacagggcctctctgtcacccaggctggaatgcagtggtgcgattataggtcactgcaaccttgaactcctgggctcaagtgatcctcccacctcagcctcttgagtagctggactactaggcgtgtaccaccatgcctggctagttgttttaattttttgtagagatggggtctcattatgttgcccagactagtctcaaactcctgggctcaagtgatcctcccacctcagcctcttgagtagctggactactaggcgtgtaccaccatgcctggctagttgttttaattttttgtagagatggggtctcattatgttgcccagactagtctcaaactcctgggctcaagcgatcctcctgctttggcctccaaaagtgctgggcttacaggcatgagccaccagacccagcctagagcagcattctaatttctgatgcctgtttgcagctgagctgcatgaggcttcaacgaaggagttggaggtctgaagttccagcgttggctctgctacccctcagctgtgggatttggtgaatcaccttcaacactgacttctctgattcctatcctattaaaatgttttattcatctttgacacatccctcctccccccaagtgcctagcatggtgcctttccttcatcgatacccaataagtgcacattgaataaatgtcagtttctcaaaaataaaactggtgtatgccgtctccttccattctctcattacaaataacatcaagcatttgaacgagagaattacaaactgtgaagcatgtgtgctattataagaaatgcttattaagttctgtatgtggcagtggttataaaaagggaaaagagaagttaccttcttgcagggtttatgttctgtgactttctaaatttttttaaaggctttgggaagaagaaatattattttccttctatctgatgtcattatgactttaataagtatgaatacaagtcagaaagacatgccgctgagtctcaatttaaatttcctggttgtgccaggcagaaagcttcgagctttcatgcatgcaaggaggcacgactcttcacgcaggtgccgttgcagaatacttatcttgtcagcttccacttcaggctggtaggcttggcatacattgtgaaggtgttagacattctgtttacataaggactgaggggtgacataatgtctattgaagcaaagtcacttagctccccgctaggcaacagggagcatttaaaaactgaaaactgatcaaagccatgggcaggattgagatacctttacccagggggcgggtggtctcttggttcgttgcccgaaacagatgtgcattattgcttcactgtatttccagaccattggtgaaatgaatcaggcagaattaaaccctgagtggccaatccggagagcctgcttaagtgggcacaagtgtgtccaaataggttggaaaaaatgtcaaatcagagtaggcgcatacaagatgtgatgtttctctttttatagactgctataaaagttgtttaaaattaaacaacccttcagtacttaaattatgtataatgagacaggtaggtcctggaacagagatctttcccccccttcttatcccacttaaattttgcactccctaccagagtatgtgagatataaacactttcatttccaggatatagtgtagtcttaggatggagcaaagggagagagagagatggcttgacatagaccacagaagtagcaaatatctttcacattttattccatgaacttcaaggatgtagccaagggaaaaatgaaaataatttcagatgcatctgtcctatcaagtggtaatcttctgtattttacacttccaaaatatatgtagatatagaggaaggtgtattctatagtgtatactccctctacccccctcccaaataagtagtttattgctgttttgctttttattttggggggctgtatttaggaacgaacaatagtatataatgttgcattattcagggttgacaaggttaatgtgtcttgacaatcgaaatatctgtgccctttttttccatttggccggcttctgttagaatcatttatcttgtgcctgtaggatgcaatctaactggggcactgctattctcctctcagtgttggatgacatgagatgctcttttctgaagccaatggattgggcatctctgatttcttgttcacctagaggactttgttttcagggcaggataaatgcttgtttattctcatgcatgcatgctctccctccctctctcattgaacgtgatgttttcgtggccccttggtgcttgagacctggctcataggaagctgaactcagaatcaaaacttctcctgaggtgccacctagcatcactaaccccagagatgaccggggtagccctgttaacactacacaaataaaatatgtcaccagaacatttcactgagatgaggaatttatttccatgattctctaaggttcaactatagtacatgctgctttttcctactgggcagcaaacatgttttactaaactcttacctaagtgctttctgtttacaattccacaatgaattcctgtcttccttcatgttgatttctacaaatattgtgatttacttccacacctttttgaggaagcaaattccaagttgtgatgcatcttttaacttttatcagcattttattgtgaacaaaatttcaacatatggaaaaaggggaaggttttacagcaaatatctgtataccctccacttagattctatgattaacatttactgtatctgctttatcaggtatctattctgtttatccatccattttcccattcagctgtccatcttttttcttttttgatacatttcaaagtaaagttgcagacatcaccggacacggttgctcacgcttgtaatcccagcacttggggaggccgaggggggcggatcacctgaggtcaggactttggtctcaaacatgaagccttgtctctaccaaaaatacaaaaattagcctggtgtggtggcgggtgcctgtagtcccagctactcgggaggttgaggcaggagaatcacttgaacccaggaggccgaggttgcagtgagctgagatcgcaccactgcacttcactctgggcaacagagtgagactccatctcaaaacaaaaagttgcagacatcagtacactgctttctaaataattctgcttgcctgccattaaagttcaatgtttatagatttttgaggtaaaatttctatacaatgaaatgcacatttcttaagcataccatttgatgagttttggtgtgtgtatacaccactgtaacccaaacctctgtcaagatacagaacattactagaaagttccctcaggctgcttgttatctgccctgagcatgggtggtccaggagtcacccagaatttaggaccataactctcttcatctttcctttctgaggttcccttcctttctgggatgccccagatctgttctctgattctccgggcagaaaggctgttggtttcctgttggcattcctgctggccagcctggtgcagaccaggccctccctttaagccagaagtcatgaaattgggaaatacatacagtgctgtttcccgcctccagtatcagtgcccagaatgtgcctagttttggtcaatctccagtgccttcaggtagctgggtgttattttttaaaaatcatttttgccagagtttatgtttctaatctgtgggagggtcagtccaataggatcgtattggccattgccagaaatggaactctgttcattgttttaataattttctgtgtgtggaatgcccaaaagatctatttataaaaggatttcaaatagcctatgaaggaaaaagtgtataggtcctgttgctgcattgtgttatgttctgggagatgcagtgacagtgtgtctctaaaaaaatggcatctaaggactacttgacacaccctgaacaaagagtctcactctgtcacccaggctggagtgcagtggtgcaatcatggctcaaggcggcctcaaactcctgggctcaagcgatcctcccaccctagcctcctgagtagctggggctacaggcgtataccaccacactcagctatttctttttttgtagacatggggtctcactatgttgcccaggctggtgccttaattcctggcctcaagggatcctcctaccttgtctttccaaggcactgagattacaggcgtgagccaccatgctcagccttgaataaaaggtttttaaactcagggagtgtcttcagtgttagacatgacagagttaatttggttgtccagtgtttattggtccctttcaaggcactgtggtgagtactggctgcagtagggagggggcaggatgaggatacaaatgacaggaagatgtggcagctggcttgagggaaggaggagatgcacagacagctggcccaaacagagcatgatggtatctatgatagaggtgaaaaaaaaaagaggccgggtgtggtggtgcctgcctgtaatcccagctattcgggaggctgagacaggagaatcacttgaacccaggaggcggaggttgcagtgggccgagattgcgtcactacattccagcctaggtggcaagagcaaaactgtctcaagaaaaaaagagagagagagaatattgagggagcaccaaggaaggtatggttaagttcagggtacatgacattcaggctgagcgtggaaagagaatttggatttcccttggtaggtatagaggcaaaggcattcccgccggaggaatgcatcaggggcagtgttgattcgatggtgctgcgggagccctgagaggtccgaggtgcctgaatccgagcgtgagtggctactggtgctggcacagtactcggcaggggaagagattgcaaaggtaggctgacgccagatgctgagggataatgaagccagtctaaggagtttggactttattttgtaggcaatgaggaactatttacaactttttagtaagactgtggaatgactgatgtgtgctttgggagatattcctggctgcagtgtggaagaggcctgaaatgggagacgaactggggcatttttgcaattgtctaggtaacatcccccctcccgtttaatctgtatttacagcatttgagggtctttttgaaattttaaaatagtttacattttttctttcctgcaattaaatttagactgtttaaccaagaggggcaattaggtgacaaatttgtgaattgcacccaagagatgaaaacttgtggaaaaagtactaattccagtaactaaaatctgaaaggttacgatttaaatagacatttaaatagacttaacccgatcctcctggaactctttccctcattcctccttacaattaaaaacacacctttgtgagctggttgcttagaattaggagtgtcatctgccgtcacggtgcagacggtattcgcgtctttgaagctagttggcccacgggaaacttcatcagtgagctgggccttgttcacaggtgctcagccacctgaaatgaccagattgaaatccagcttcattttccacctggtttgtctccactctgttggccaactcacacctgttccaggtagcgtgagagagagctgtcatctcctgggggtggggattggtcagtgccagttcaaaccggtgacacactctcctcctttctaccttctgaacgaatcccataaggcctggctcttaagaaagttttatttaccgaggacaatccgcaaaacttcattacctcggttcacaaaaacaagggcagccctgcgtatgggagatgatttagagaagtttagatgttcgatgtcagtgtttgcggtaggcaggattccagccccgtgggcttcgcctcctggtgttacatctgtgaatatgccaccttatatggcaaaagggaattatggttgctgagcagctggccttaaaatagggagattatcctggattattaatcacataggcccttataaacacagaagaggaaggcagaagaatcagagggatttgatggaagaagaggcaagagggactcgaaacatgagcacctttgaagatggaggaaggggtccccaggccgaggaatgcagtggcctctggaagctgggaagggccctgagctgacagccagcaaagaaatggggagcccagctctgtacttgtgaggagctggattctgccaacaacctgaatgagcaaggaaacatatcctccctcttccctccagataggagcacagtcctgctgacacctggttttcagcacagggagacccctgttggacatttttttctttttcagacaaggtcttgctctgttgcccagactggagtgcagcggtacaataatggctcactgtagcctcaacatcccgggctcaagcgatcctctcgcctcagcctccccagtagctgagagtacaggcatgcactaccttgactagctaatttttttttttttgtagagatggggtttctccatgttgcccaggctggtcatgaactcctggcctcaagcgatcctcctgcctcagcctcccaaagtgctgggattataggcgtgagccactgtgccaggctatggacttctaacctgcaggcctgtgagagaatacatttgtgttgttctgagctgctcagtttctgaaggcagcaataagaaatgaatacagtgttatttatacagggctttgttcccttggaaccttttaaattggagtgatctgggatgctggcatttgattggcaggtgctggagtcagactgtgtttgaatatgggccttaccccttagagagtgtttggttttcggtgagttttcctctctgtgctccagtttagcactgtgaaatggaaataataaatgcattgggttctcagggtggttgggaggattgagataatacatgtaaagagcctagcccagtggttggtacctcttaagtactcagtagttagaagcttttattagagttgtttgcaataaggggccattaaaaagatcttcctgttccatacctgtcatactatttcagacatcattctcttatgctaagagcaggaaaccatcaaaaagaaaactggaacagtttaggcagtgcttactgggtttctgaggtctagaaagcacttatatatgatggaccctctggcacttgagcagctcatgcttatgagagaaacctacgaggctgaagcattatgtcaatgcaggggaaaatgaagtagaacccttgggggctatgccagtttggaggaccacaaataccccgtgaataagctcagttcctacagtcagcttctgactggggcggagatgtttcccattattaagcttaccgaggtgaatgatcaagattcattgccagtgtccagataatcatcatgtcctgagaaatatttccaattccttagtcgtgcaatttcagaatgtcatgctcccataatttccatagtcctctaatgctcttgcatctcaccatacccccatctctaggattgtgaatttcctgctatgttatgatgatgtcctaatcctggaatcagtagaggatgaatctgtcaaagcaaaaaatcgagaaatcctgtattatttagcagcatcaggtgtcttggtaaaagaggaaagacctgtagtaccaccattttgatcttccacattgatgctactagtattctacccttcaggacaagagcttagcgctttcctgcagatttccattgtccacagtgtgtttcatctacaaaaggcaatcactgatgaacccttgtacctccaccggggaggggtggagatcaggattccacgtcaccaatatgatttgcagagtatgaagctgtgcttagctcggattgccagtatcaggaaaattcagtatttttctaaccaactgttgttttatcttatgaatattgagactcttataaatgaacatgtttctatattctttggtcacttcaaaagtcagatcaacctctctttatcatatggtatttagtatcctatattaactgtatcttattttcttgccccattttcccttcattcctatttccacatatgttcaatgtttattccataaaatggtatttctataagttgtctcagatctattttcagaacgaggcaggagcaaaacgaattactgctcaaaatcaataataaatggtcaaaggaactatagcctgttgtcatgggagccagtaggtcccacacctatctctatggtcatgcctttgggactctcctctgaggatgagcctacaccctgtattatgtcaccatatgtgtggggctggagtcttttgccaagtggttatgtgtcaggcacagccctgagtgcagacgggacaccgtgacattgcctggttgattcattgtgaaggcatcactaccaggtttgacttgacatttaactttcttaaagtatggttcatggataatgagcatcagaatcaatggaggggcttactcccagagatttcaatttagtatgtctgatctgggaccaaggaatccgcattttaagaagcatcccagatggtttttaatcaagtggttcatgggccagattttgagaagtactgccttaaagggttggtaggatttaaagaggcagaggtgtgcacttcagagtatagaacgggtggaaacagaggcacagattctggcaatgggcacagtgggtgagacaggatgcttaagggtgggtgccatgaaccctgagggtgcttttactcactgtcaatgccatttgtagatctacatcaacattgaaacattcaacgtcaacatttgagcgtgctagctcaaacatttaacatgttgtgtgcccttgaacatctgcgtgcctactgtgtgctggctgatttgccaggtgccaaggatcctgaaatactaaggccacattcgtctaagagcatgctgttccaaaggagaggctgacgtgtagatacatggaacttccgaactgcagaggtaccatgatagagatatgtttgggggagtatcaatgaggaaacgataagggcaggatgaggaagcagaggagatctgaaactgaaagccgagcagatatttttattctttggagtttctgaaattgtgcagtgcagtgttttagcttaacattctcacagtgacttttgcaataacgataacttatttttattggatggtttgcttgtgtgttacctgtctttttgctgcttaattaaatgacctatataaatatagcagccatgactaggtgtatcttgagatttttccagctggttctggaacttgaaattttttttaaaaaagttaaaagtcctctttgactttttattccctagtcttaaaaacaaaatgacctttatttgaaagatttaaaatggcaagattttaaataacttggctattttttatttctttttaagtcaggtttccatggtcatcaaacactttatgactaaatataagataacttcctcactcttgtccacttctgccccattctgagatgtttgagctgtaattctgcccaccttgcttcttgtcctgaactgtattagcagtgatgttggatggatccatctcaggatacagcttaagtgactctaatttagagtgagagctaaaattctcaacctacttatccttggctacaacccaaagtttcaaatgttgttggattactctcttcccggccatattaagctcagtgcctttgatgtagcttcaaggcagacttgaccaagtggtattgcctcccgctgatatttaggtggaagccaacactataaaaatgaacgttttactaagagtactcgctctactacctgcaaacccagccagttgctctgccaaattggtcaaagaaagaactggcttgagaattgcaaagtgtgttcctctggcaaagaaatggagctcagatcaatctcatggggctccctaactaaaatgtagtagacatgtcaaacactttaattggaaacttcccaaaaatacccatcccaaatgcttagtttattataaaagcaattttgttaagaaatgaataacaaggatgaatctttgatatctttttaagccttactttattcttccactagcccatgcacctgaatttctaggatacaatacctaacagtgcagcagatatttcagagtatataattgggttgacacatatattttctgcctcggcattctctataaggttgcagaaagatctggcgatctggattacacagaaacatcattaaattatatttacaaatctctatggaacaaccgtagcatgttaagacctataatggccacagaattagacatggcttctgtccagtggagtcacttcattgggccaattacagatgaactggcaatcagaagatgcccagggatctccttagcctaattttcttagttagaatgtaagatgttttctttgttagtcaagtgagactgtttttcaagaagtctaatctggacctctgagtaattgatgacataaaatgatgcagaatctcagaagttatttaatggtgtacctttgaatggtgtatacatctccttcagcacaattctaagctggggtcctttaagagctgcttaaacgcttccagctacaggaaactcactacttcacaaacacacttcatttgaattttgtactgtgatagttgatagctttctactcagtggaataattttctacctccttaaaacttattggtccttggtcatccttctagagcaggagttggaacatttttcttaaagggcgaaatggtaaatattttcagctttgcaggtgtgatctttgtctcagctactcaactctgtcatggcagtgtggaagcaatacttcaacaaacagacatggctgtattccattgaaacgttatttataaaactaggtggctggctcatgagctgtagcttggtgactctcattttagacctgtgtaatctaggtcctgaaaatgaattactcaaactcttaattccaggtgggttccctgacatataaggggcacttgctctccctttgtataggcttgatgagtgaactaagaaagtctatctaatgccattcaactaatcttatcaaagtttttaaagtcctagtagaaatgcatttgtaactggaattatctgtggttctaaatacgtacctcatgttattatggagttcaacataggttttttttttttttttttgctttttagaaggaggtcattttaatgctatataatttgttgtgtgtgccagaaagccataacttcaggaaggtgcttttagtgttccatcattgagctttctgggatgggaggtggcaatctggaggtgagaaagatacaggtgaacaaaaatctttgccctaaaagtgtagactatttttatggttctgaatacagccctcctttcagatccgtggattataatttagatatcagcacagaatagctatctgaagcattgctcatgtgttttcccccttttctcttggctcttctgtagggctgtggtagtgccagcttattatctgctgggcataataaacacctacacctagcctccagggatcaagaaactgggtcagccaggagtcagcctatcatgctgcagaagctggtaatattaagcccagaaccagcctcattttaagattttacattatataatggtaagagcaatgctgatgttaaaaaaaaaatactggttggagtccaaagtaattttagacattaaagaaaggtttcagaacattttaagtaatgtttattaaagctagccctgacctcaatcaagcacctgctacttaattgatcaaatggtcactggtaagccctgtctcttctaaagtgacttcgccccaagtcatccactgacctttgctcagcactttctccagagacgagagagtgcacaagaggaaatgaaaaaacagatttggtgggaattgttgttcctggttgaaatgaaatgtatgtatccctgctacccaaatgtggtctgtggaccagcagcagctgccccactagggagcgtgtcagaaatgcagcatcccaggcacctttagattagaaacctgcatttacaagacccctaggtgattcataggcacagtaaggttcgagaagcactgatccaacccacagccctccttctgcacagcggtaacccagcagggccatctttgtttcagaagcacccatattacaaagagcttgagttattctggggaggtaaggtaaaggagagaagtcatacttcaatggcagtgagactttgcctagaaatctacaaaataacattactctgagtgctagaactgtaagtacttccatcactctgctatacagccttttctaaataagcattaaaggatataggttttcgtctaacatcaattttttttgatatgttgtgctttctatttgcattcagctcaaaatatttttaaaattcccctcgtgatttcttctttgacctgtggattatttagaagtatgctgtttaatttcgaaatatttggggatttactgatttctagtttaattccgttgtaatgagagaacactgtatgatatcaatcatttttaattttggtcttattttagggccataatatggttgatcttggtggatgcttcctgtgcccttcaaaagaatatgtgttctgttgttattgggtagagtgttcaataaatggcggttaggtcaagttagttgatagtgttgttctttattgtctttttttctttctttctttttgaaacagagtcttcatgtgtcatccaggctgcagtgcagtggtgcaatcacagctcactgcagcctctccctcctgggctcaagcgatcctcccatctcagcctcccgagtagctgggactacaggcacgtgccaccatgcctaatttttgtgtctttggaaagatcaggtctctccatgttgcctaggtctcaaactcctgagctcaagcgatctgccctcctcggcttcccaaagcgctgggattagaggcatgagccaccacgcccagcccaaatctttactggctttctttgtacttgctctatcaattactggatgttgaaatctccaactataattaaggatttgtctacttcttttttcagttctgtcatttatttttccccttcctgtgttttgaagccctgttcctgggaaatccacatttaggactgttatgtctctggatgaacttgattattctctttgtccttgataatagtctttgttcagtagtcatctttgtctgaaattaatatgaccactctagctttcttttcatttgtgtgcacacggcataatgttctaaccttttttgttgttgttgtttgtttgtttgagacagagtctcgctctattgcccaggctggagtgcagtggtgcgatctcggctcactgcaagctccgccccccaggttcaagccattctcctacctcagccccctgagtagctgggattacaggcacttgccaccacgcccggctaatttttttgtatttttagtagagaccgggtttcaccgtgttctccaggatgatctccatctcatgacctcgtgatctgcctgccttggcctcccaaagtgctgggattacaggcgtgagccaccgcgcccggactaattttctaacctttttaacttttaacttatctgtgtctttagtctttatatataaagtgggtttctcataaataacatagagttaggtcttgtttatttcttgaagcaacctaacaatttctgccttttaattggtgtgtttagaatatttacatttaatgtgattattgatgtgtctgggtgtaaatctaccatcttgctatttgttttctatttgtcccatctgttctttgttcccttcccccctttttctgccttcttttggattgtgtattttttgtgattttattttatttccactactggtttagacctttatgttttatttatttttagtagttgctctaaggtttatagtatatgtgcttaacttaccacagtctgtttttaaatattttaccacttcacgtagaatgtaagaattttacaacagtatacttcaatttccttcttctgttctttgtactattgttttcatatattttatttctgtttatgttacaaagcccataataccctgttagtgtttgcatcaagcagtcaatcacgttttaaataaattaaaaatgagaaaaagtctcttacgtatacccacctatttaccatttctcacactctttattcctttttgtagatcaacatttttttttaatctagaatcatgttccttctgcttgaagaacttctgttaacttttcatgtaatacttgtctactggtgataaatcccctcagcttttatttatctgaaaaaattctctatctgtgttgtggaaagatattcactgggtctataatttgagattgacagtatttatttcccttgcagcactttatagacagtgttttactgacttctaccctggatggcctgatgacatcttggttcctttgtacataaattgtcttctgttatatggctgatttttaagattttctctttatcactggttttcagaaatggttttatcatgtgccttggtgttgttttatttaggtttcttctgcttgaggctctttgagtttctatctgtgagtttatagttttatttaaattcagaaaaatttggtcattacttcttcaagtcactttttggctttcctctttcgtcacctccttctgggtttcaaattacccataggctggacttctttatatctcacgcttcagtgttttgttttgttttgtttcctctctgtgttgtctcatttgggcaagtttctattgctaagacatcaagttcactaatattttctttttcagtatctaaactgctgttaataccatctaatgcatttttcatttgactaaaagtttcatttacttattttgtgtgtctttcatgtatttccttctcatgctcatgcttttctttgtattcttgagcatatatttatgatttataataccaattgtaaggtcctttccttagtcattctatcacctctgttatttctgagtctgtttttatggattgatttttcttttagttatgagttattttcctacatcttcaaatgctcactaatttttgagcatgcaaagatgctgtgtgctggattttgttatattcctttttaaaaagtgagcacgcaaagatgctgtgtgctggattttgttatattcctttttaaaaagttagattttattcttctgtgcaacgaagtaacttgcagatcaatttgatccttttgaactttgctttcaagctttgttatggtggattcagacaggcctttattttaggattaatttatcccctcctaagacacattcttttaagaactctacctaatactccatatattatgaggtgactacattctggttctccagcacgcaaactttccccagccttgtgtaaactggtaattttttttcctgctgctttcccatagttctttccttgccttggaggttttctttgtacacaagcagttcagaactcagccaaaggttagagaagacccctctgtagatctttggagcgctctctctatgtagcactctcttttccagtatttagccctgaaaatttagatgccttggccttcccaaactccaatctctgtcttctaaactcaatgagattgttggaccctatttggtagccctctccctgggctgccacgtaaacatataagtatccttccatttgtaaaatacatagcatagtgtgttagtttcctaaatccgccacaagtggatgactttaaacaacaaagtttattctctcatagttcaggaggctagaagtctgaaaccaaggtgtcagcaggcagtgctccccctgaagactctaggaaggattttgttcatgcctttctctgagcttctggtgttgctggcaatccttgtcttgtagaagcatcacttccatctctacctcggccatcataggacattctccctatgcctgcttatgtgtctctttttcttcccttatgaggacattagtcagattggattaagggcccaccctactccagtatgacctcatcttaattatatcaacaaggatgctatttccaaataatgtcacattctgaggttctgggaaggacgtgaattttggggggacactattcaacctagtacctatggcaactgtgagtcccaaagttgctttgatcccttgataaggaaattctttatgctgagataagactagtttcagatatgctgcctgcatcatttccagactgctctccctacgtctctgcaccctacctggtaatctgtgagtgttctttcataattatacaatgtatccacagcttcatcttcatagatcaggaatgcccatttccttgcaggttccctgtctattcctgaacttcagggcagtgagaaaattccatcttgtgtgccactgaatgcccttcgtagcttcagtcataactgttcatcatcactctctcaccctgctaaaatgcccactctgaaagtttgtctatttcagaatcttgcctctaattatcttcacaagtttcctttgtgatgcactgccctagaagtggctcattttccatatcaaagttctgcagatgagaaacagaattatagtagattactcttgctagtagagaagaatgcccctgcatggggaagatgccaatcaaacataacattttccgcaaacgttttgcatattgccttatgttatagtccagcttctttctggaaagatgacagtccatacgggccccagcatctttgtgaattcgtactgagaatgtgaattcgcagattgagtagccaccagacttagacaagtgatctcccagctatccaggcaaggagctggataaagagatgatgatggtcaccaaggtcagaaataactggcagaatcaggaatagattcagtgagttttggctcacaactcaccaccaggcattttttttcaagacaaagaaatccatctgggtttctgttgggtccttgcaggacctgactagatttgtgtttggaaaattgccataccaacaactacggtttgcaaccaagcctatttaaaacaagatcaacaaaacccctctcttccctacagtgccttgtggtatttgagtgttaattttgacttcttttgaatagctgtggtggcagtggctaaagggtgaagctttaagatgccttagaggatcagtcatagaaggcggcttgccaagcctgacaccgaagaaaaacgcagcccttgggtccggctgtgcctcgcaattctggcatccagtcttttctctgacccaaccacaaaccccttcaccctctctccacccccttccacatgctcacacgcacatgaggtgcagccactgtccccttctctgtgtgctcccttgtccacggatgcatttgtggttggaggggagtcggtgcagccatggtagaatagaggtcctcgtgtaagactaacatgagtggtctatttactcatctgtgctgcccactagaccaagagctcctaagagcagagactgtcttattcttgtttatatcttcaatgtccagcacagtgtctgctcaggacagccattgaattatctcctgaatggttagatggtataaggaaggcttcccttaaagaatatcttgccgctgtcttgggatttgacattcaatgaatcaggagatgattcttgaagtttcatatccgttaagttcctcattaccatatatgtatgtatgtatgcttgatactagtaatatcatcaatcttaccaggaacgtggtgtccccaggaaggtcatacattgccacagaatctggccaaatggttccttgagcagttccacgtggaggggacgtctgtgcacatgagtagataaaaaatgcaagcaatgttgttgaaagttagaactcagcttttttccccttgaggtcctcggccaccactcagctgctgaaatccagaacactttggttctagtcctggttctgacatgaatgccctggtgaccttcgattcacttaacctttccagaccctagttttgcctcatcagcaaaacacatgctctttaaggcccttataaccctaaactcttgccttgaacctgctttgagttttaagtaatgaacacatgagactaaacaaatcagattttaaaagcttgagtgaaataaaagaatttaaaaaaaagaagtgaattttaaagactaatttctttcttcttcttttttttttttttttttttttttggagactgaatctcactctgttgcccaggctggagtgcggtggcacaatctcaactcactgcggcctctgcctcccaggttcaagcagttctcctgccttagcctcccaagtagctgggattacaggtgccagccaccatgcctggctaatttttgtatttttagtagagatggggtttcaccacattggccaggctagtctcagaactcctgacctcaggtgatctgcctaccttggcctcccaaagtgctgggattacaggtgtgagccactacacctggcctctttcttaattttatctaagaaagcagaatttcacatcttaatttttatttttcaactttttttttttttttttttttagatacaagatctcgctctgtcacccaggctggagtacagcgattatagcttactgcagcctcgaactcctggcttcaagtaatcctcccaccccagtctcccaaattgctgggattataggaatgagccagtgtacctgaccttcaagtatattttttgaggtggtatgatagactagtgaaattaaaacaggaactgtgaaattataatttatttgttccttttcctaaatacctttgtcagtctgcatgtgaattaaagtaattatttactttatatcagagtagagcaaggaacaccgtctttccaccttgactttgctgctctgggtgactttgggcaagtagtttagctctcttggaccatagttttacttatttatttatttatttgtttctttgagacagagtcttactctgtcacccaggctggagtgcagtggtgcagtctcagctctctgcaaccttcacctcccgggttccagcaattctccctgcctcagcctcccaagtagctgggattacagacgcctgccaccacacccagctaatttttgtatttttagtagagatggggtttcaccatgttagccaggctggtctcaaacttctgacctcaggtgatctgcctgccttagcctcccaaagtgcggggattacaggcgtgagccaccgtgcctggctggaccgtagtgttttaacatgtgaaagtagatgtctggtgaataaaagttaaagtaaagttttgaatgcatcaaaaacgtctctttgaaataagtgctgttatgcggagcctccaaaatgagttttcttcacctcgtgctgtaattagtgagtagaaagtctccagttaattttgtaaaatataagccattacggacattgttctttctccctggattaacaactccagcagatctgaatggcaatagcacatattagttgaacgagggtcagtttggcctttgccttatattcggcattatcgttacaatgcgatacaatatcctcttcaagattcaagctttcttctcttattttatgcttttctatgtcacatttctccaagactatctttggattacttatacacacagctgttttatgagactctgttggagcttatgagtcagattactgttaccaaaatgtttgtgaaatcacttcttaagtcatatatttgcatcatgtacaacctgtttgacaatcaaaacattatgcccttcagcacttggctggttatgatagtaagttttccagtagagtgttccagcagaatataattgggcagtagacagaaggagcacagtatattattttaacatagaattccaagtgcatttctcttcttgtaagattgagaaggacacataatattctgtaatagactcagggtgatcaattaatagcatagagaaattccagtgcagctggggcattaccaagtgcagccctggagccaacaggggtggatggaaggatggaatggccggaacacaagacgcagacatggccactgacacagcactgcctgtctgtgttggtcagtatctcaggcacctgctgacactggctgttctttacctgctcttggccaaccttcaaggcccatctcaaatggtggctccttcaaaaaggcttcattgatatcttcagagtagacttagagactccctttcctcaaagtctttacggcattttctttgtactttctgatcgctcagttgtcatttgtcatttgttattgtctcattgcccccacttgtccgtaacttccttgaggacaaggaatgtgtcttactccccttggatttcttttcttttctttttttgagacggagtctgactctgttgcccaggctggagtgtagtggtgtgatctcagctcactgcagtggcgtgatctcagctcactgcaacctccactttctgagctcgagcaattctcctgcctcagcctcccgagtagctgggattacaggcgcccgccaccatgtctggctaatttttgtatttttagtagaaatggggtttcaccatggtggccaggctggtctcgaactcctgacctcaaatgatccacctacctcagcctcccaaagtgctggcattacaggtctgagccactgcacctggccaaccttggatttcttaaaaggaaggggttgtatcttgattaaggtgtgagtggtcaaatgtcaatgcagtgttattatatgtcatttttcaaaggacacatccaaattcagccagtgacatcctgggttgacacttgaaggtctgctttaatgatcttgaaggtttgctttaatgatcttgaaggtttgctttaatagtctttcgcagtagtcctgggcactgacttttgctaaggcatgacgtgggggaattcaaacttttatgcagtcagccttgccctcttggagtttatgatattatcagggacaatatacaaatatataacatatatacatatgtcctaagtgctagctgagtaaaacggcacataaattctatagaaatataagcttcatccccagcttactaaataaatattctttctagctctgaacataattgcatctgtaacaatccttatattctgattaaataaaaagatgcaactcaatgtgcatgtctgagtgtgtgtccacgcattttaagtgtttttccagtgcccataatatgtcttatcaacatattgattttctgtccatattctcgcagttcttctccaggggataggagtatgttgctagaggggatcttaatagttggcttgatgtttaagccgccgtgcgacgcagatgtgcagccagctgaagtccgttttgcaatgacggtatcctgggagtctggaggagaaaccttttaacgactgtgagatgtagccacagcccataaaacatggccgtgcggcaggcgcccagctctccacctgacctgtaaactcctatgcgcctttgcatccccacactctgctttgcagatactcttatgaattctgcaagtcttggtaaataggttagcttttagaaacctgtgttttaaagtacaaagcatgcatctcagatgcgagtttagaacttggagaaagttctcccgtgttttcagcctccactgtctgcagccaaccccaggggaggaatagtatggaagagaactcaaagaaatgaaagcacaacatacccctttactttgaaacaagaggcctgtaagtattcatgtaaaaagtcatggtaaaattctgtgttcttacagaatgatgatcctcttattttcaaagttgtggggaggcactcttatgggaataaaaagactccaaaaacaaaacaagaagaaaaagtatttttctacacagaaaaacttcaagaaaacatcccatcgccttttatgtcctaggcttttatccttattcttttaaaacacccattaaaaagaaagaggctggcgggtttcatgctaaaagctatttgctacaggggacaatttgccagatatgaaagtgtggtttgtgggtgttgacattcgggtttgtcctatcatggctgggcagaacctctgatggactccactggactatttactgggctgacccctctgagaagtggggacactgcccctccattttaaggaaatggcaggctcagatggtgaatgcaggtgcagtccttggccctgctaaaaggaaagaaaaaaaaatctatagaatgtggagcaaataatacaagtttgccctccatggtgaccttctctctgcccaccctcttggctcacatcaatggcaagttataattggactacaaggaccaatatattgtgtagtctagaggggaaaatgccaaaagaaaaactccgttggatcaagcgtatgtgtcctgcgttcatttctaggtctgtaaacaaacacagctgttgagtgaaggatccgtcttcagaaatggtgaaaaaacagccatgccctgccagtgagagcgcagcaggggagagttgttccagggcttgggaggagcaggcgaggcgcagcagggccgggaccatgtgtctcctccgtattccaggagaggccattctgtgttttcagctgaggctgttggagcatggagaatgatgagtgtgggaagattgggagggaagaggattctgaaatttcatctgctttcctcaaattaaacctttgtttaacatacaagaccttggctgcctttttctggaggtggtggaagggaacttgtatctttttctcgactaattttaaaataatctgcaacttggagcaaaagacattagaaactcacgggtccagcagcttgtatttatatcagttattgctaatttatatcaattactgctaagctgaagttttgggcctcactcctgtctcttttctctctctacagctaaaacttaggtaatatctatattgtgtagagaacgtgctactgcgatggacctgccatttgcacatcagatgttcgttctgatggtgttatatggaggtcagatttctgcaccatgatggacctctggcttttggttgcctcccagtccccaattctttttattaaaaaaatttttttaggggcagggtctcgctatgttgcccatgccggattcaaactcttggactcaagacgtcctcccatctcagcctctggagtagctgggactacaggtatgcgcccccatgtccggctgcccttcacatttttattaccggaagtgcaggtccctcagcagtagctgatgcaggacgaggcccaagggagagtaggggagtgaggtcgaggagggatttactttatgcctggagatcttcttagcttggcagttgatggcttgaggcttcccttcatgccttcatttatataatagacattttcataatactctgtgcaggtaattcgttgacttcctggccaaattttttctcgatagtgggagactggtcgaaagtttgaactttggctttttgcagttgtattcctccctgctcccacttgcagtgtcgttttgagtgaatcactgcccaggcatggaccattcccgagacttgtaggcctcgagtttcccagtgattggttgatacttctgccttctgattggttgggtgagttggctggtgcagggatgctgatgagcccaggattgtggatttattcccccaaaagtttaaattagtttcccagagagggggaaaccccagtttgaccacatttattattttatttgctgcctcaggattgtaggagggacaatgtaataatgtaataatctaataattggaccaactcagcagtacaggtaaagaacaaaagattcccctcaaaaacaaaacaatacaaagctaggtcaatccttgcttggtgcagttaggtaccttgccccgtgaccacacctgatattaataagggatgcgtaagtgtatcaaaaacacacattaaccaaggtacatttctcgccatgtcagcagcatcatctcccagggggagggaccaccctgattcctgcttctctatcactaattggcttgacgctcttttagcacatgctggtagacggcaagcatgtttcttgtggctgctgtcacaaattaccacaaacctagtggcttacaacaatccacggttattctctcacagctgtgtaaagcagaggtctggcatgagcctcactggattaagatcaaggtgccggcagggccgtgttccttctggaggctctaggggagaatccatttcctcgctgtttccagttcctagtaaccgcttgcattccttggcttgtgataccctccttcaagttcagatttctctccgttactcccacttccatcaccacatttccttctctgactctcctgcctcctgcattccctttgtgggcccagctgaataatccagatcctttctccatctcaaaaatcttaccttaagcattcctggaagatattcacagcttccagggatcaggatgaggacatctttttttgagcggcagggaaatggcctttctccatcggccacaataaacttaatgtcttcacaatgactcacagtttttaaaggggagattctttctgcatttagtgtgtgcttccagtttttttttgtttgttttttatttggcagatggaagaaagatcctatgaatgttgaggactgtatcttgtctgctgattttctgagtggctttgcaatctacctctaataatgagctaaataaagtggattataagaaatcactaggctgggtgtggtggcttacacctgtagtcccaacattttgggaggctgaagtggaaggattgcttgagaccaggagtttgaaaaccagcctgggcaacatagtgggaccctgtctctacaaaaatgtttttaaaaaattaaccagatgtggtggtgcacacctgtagtcctagctacttgggaggctgaggcaggagaatcacttgaacctggaagatcaaggctgcagtgagccaagatcgtgccactgcactccagcctgggcatcagagtgagatcttgtctcataaaaaataaaataaataaataaaaagaaaacactaattagaaggtatgtaattcatagacaatttccttgctcctaagtgtagacttgttttaaagaatagcctacatcattaaataaaatcagttatatattttgaaggcctatcttctatgtcttcatggtacatgtgaagacattttagctatcattcctatcctattggtgaatttattgctctatttcaaaaaagtcaaacaaaatcaaaaagaatcaaataccttcagacacttaggattggcccagtaaggtataaatcaaatggatatggaatagtataatttttatttttattttttatttatttatttatttttttaaatgatagtttgtttgttttttttttttgagacggagtctcgctctgtcacccaggctggggtgcagtggcgcgatctcggtgcactgcaagctccacctcccgggttcacgccattctcctgcctcagctctccgagtagctgggactacaggtgccggccaccacacccggctaattttttgtatttttaggagagacggggtttcaccgcggtctcgatctcctgacctcgtgatccacccgccttggcctcccaaagtgctgggattacaagcatgagtcacagcgcctggcggaatagtataatttttaaagatgttttatgcttattgtgctttttataaaagatagcaacaatcttccaatgaggtcattcatttctgttggtacagttagaatgtgtgtctctgggttggtctctttgagtttcttttggcatagagcagtattctcaccctgcatgatcatcagagcacctgagatgcttcgtaaagtgtaggtctgagccccaccacggagatttggatacagtaggttatgaggggggagcgtcgagcttctcaggaaacctagttctcagctgtttttctccagatacaaatctgtaactttttgtatttatcttagggtgaagctttcatactgtgagctcattcaagccagagataatttcttatccaggaaccagttggcaaatcttttgtacctgcagttagtcctacttattttaatttcctgatttgataattccaacagccctgctacgtctgagtctgcttttggtgcttgctgtgtctcttgtgttttttgctcttagtgtgccttgtaatttttgttgagagctggacatgatatcctaggtgaaaggaactgctgtagctaggcctttggtgaagtggaggtaaggtgttgtggaggggaagccctctgtggtctatgattaggtctgggtctctaatgagcctgtgccctggtctcagcttttttctttaatgaccctgtgccctgggctcagtgggtctcaggtttttttctccccgcttgggtgggacaggatggctggagataggtattttccttctcttcctggggaggcaagagcgggcaggaagtgcgcatgtcccttcctccaggtggttttggctctggtttattagtttttcctgagggcaggccttgttaagaagaacggagtgctctggtgtattgcaaaccattccctttcctctcccactgtgaagtatgaaaggatttttctcccacattcacttggaggacctggtccagctcctggaagtaaaacttgtgaaagcatgcccctcccatgactgggtcgccctggagtttttcactctcagtcttgtccacgctgagcctccagcaattcgccacttaggattcaaggtttctctggcgttggttcctttggaggtttctgctctggtaagtttgagtctttgttttgccctgggcagagtggggtcctctgggtgtttccaggccatgggttctggtctctttgcttctatgtcccaaggctgtcttctggtatttgccacctgcttctgagcatgggtctcaagcctcgaaatggcctcacctcagcgtcctcaacatatgtgttcaccattcttatttttgccccgttcttattgactgtagtggttcctctgaaaaaaagtcgctccacccagcctggcatctttttctcacttctgtccagtctgcacagggacgcaaggtgttcctctttatttcaacagctttctaagagtgccgatttaatcaatcctgcatcattactttgagcgggaaaggaacatttctccctctcttgaattcccctaacactttgtggctttcttgttgtactcatcacagcttgccatgatctgtcatatattatagttacgtgtgtccttttctaccactttatgaactataaaaccaggaggccagagactgaaccttaaccaattgctgttacttccagggccagaaatgatatattgcagtcaacttgcataacagctttactgactagatacaacagttcaaaaggagtatacgcttctccccaaaactaagcacattcactgagtatgtgacgtgttaatatgctactgcaggtaggaaaaacaaaacccaaagcaaaaaagttttgcaaatgtcccaggtaatttctaaatgagactggctaaaggtaggggaattgagctagctgttgggaaggacaaagtggaactacaccgatcagctcttcagagcccagacttaccaaaatgatgagcaacctgagaattgtttcagccagtgcctcccaaactttgttggaatcacctggagagctttgaaaagcccaagttacaccccatccaaatcaggatgcctgggggggtgggagtttggcatcagcatgtttaaaaagctccccaggtgattctagcatgcagcagagtttgctatcgcctggcttttgcatcagatgcattgagtaggggtcgagttctgcacaggtgtatttgaccttacgcccttgttaagacctctgcagtgtttttgtttttcagcattttctggcctttgaatttaaaacttgaaagacttaactggaaggatcacacgtaaatcaagcataggaaaacccttatgatagttgccttagggttttggaatttcagggggaagaaacaatttagaaaaacaattcttgttacaatgtgcaaattgtaatttcacaattatttttaaaagtcaaacgacaatctatgatgtaaagaggttgatcttgaatttttgagtcctaccgcatgtctgcaaatgcagatagtttttctttccaatattcctaacttgtcttttcattgtctagaaccttgtcaaatagatcataatgacaacaggcatccttgaaaacagtgacttgtgtaaacagattttctaatgttgagtcattcttgcatcaaaaacccttagtcatcatatataattattttagtagactactattttagcatctttggatgtagtcagatgaggttgcctatgtcccctcctccaacaccacccccctgcacctcccctcgccccctttttaaatgctgcttgtcaggttttgatatcacggttatataaccacttgtaaacttcaagaatgagcttggaaactgcctttttccttttttaaaaaaatgcagtggagcattttaaatgatacagtgtaagatttatttaaaatgggaaaataagccacatcctgtttttaagcggttgaacatactttcaagtgaattgatatctaaatgcttcttcagtgatgtgaatacagcttacatcattgttaaatactaggtcctggtggtttggttcaaataatagtgaaagaaaaatcccttaaggaatgactggaaccacatgtaacaattggttctgtctctgggccttgtgacctacccggtaaagattgcatagtctcgggactgggagtttttttcacgatttgtcttcatctgagtcctggacataggttgggactggaacaaaacctcagttggagggattctggattaacagatgtaaatatgtgtacttggagtcattactgtcaatttgacatccctgttgattttatggtattacccacacccggccctaaaagcgctccttgttttctgaaccttttgattctgtacatcacctggggtgctcgtaaggattcctgagctcctttccagatttactaactcagaagttctaggaaagggggctgggaaatctgtgcagtcagcagttacaccaggtgatccctattatttgaagttcatcacagcagtgactcctaaccttgccttgcattacaatcacttggagtgttaagaatcttgatgcccaggcctcccttattgagtgaatccatctctgtaggtggggcctgggcatcaggattttgtaaacattctgccagcattgagagtcattgagtttcagcattcttaggaactgagtggtattatttgagataattgtcaattccttggctcgttggaaattcaagactgggtataactgagtagaatctgtgtttttgcttgtaacagaaatgagactgagatcctctttctgctctgatttttattttttacctcctcttctctcggatttaattctacttaaaatcatactggtcagttaagccgctgcagaataacagatatgtacctgacacgtagtaaatgtttgataaacgttaattactgttactggaatccagatgtcagctgggcttgtccagctccttaagctgactgcattgaatctccagtccatgtcctcagagcatctgctaatttgatgtttgtgggactctaccggcctctgccttggtgtctgctgctgtgcctagagttgttctgcactgagttgacccagatgtgaaatcacccctccttcacacaaaaccctcataataataccatgtgtatatagcacccacataaggtaattgctgtcattatccccactttgcagatgaggaaactgaggcagagaagttacataacgtttttcctagattatccagtaagtgcgtggtggagcggacattaagcccaggcatattgaccccacagcctgtgttgaggtttcatggtcgtatttgctggcctctcagcagcattctactgaagacttaggcagggcatggaggggtgttacacagggtggtgcagggcaggctgtatagcagaaacccaaaactgcgcatcagccattcctttccttagaagtccttttaggtcggatgcggtggctcatgcctgtaatcccagcactttgggaggccgaggcgggtggatcacctgaggtcaggagtttgagaccagcctggctaacatggtgaaaccctgtctctactaaaaatacaaaaattagccaggcgtgatggtgggtgcctgtaatcccagctacttgggaggctgaggcagagagaattgcttgaacctgggaggtggaggttgcagtgagccgagattgtgcgattgcactccagcctgggcgacagagcaagcctgcctcaaaaaaaaaaaccaaaaaaacaaaaaaaaacaaacccaaaaaaacccttttagctttcatgcttcaacctcttagggtcatccttgggaaccccacactcccctccctctattttacagaccactctgctctcaatgtgcataaccaaactcattcaggtcctaagccaacagagtggcctccagttaacgagacaccctgtgtcttcttgtcattgttcacggaaaaggcatagtcctgttcgttacttttcttgctttctcacatacagaattatacctgttgggatcttttcgttggtgaattcagaacctgtcttaaaggcccacggcccaatctgtcagtaatgaatttatttatttatgatgaaattataaggactgagggggaccagaccactctagtcaaacagccagaacactctctccctgtagatggggccaaagcaagccaaatcccaaactcaatgccagtttgttgatttacagtgagaatgacaactgccaatgggaccgagtaccatgcctttctgccattgcatcctctccctcagggccagtgctatgggggtaaaattataaccaagagctggttaggcaaaaccagaaccaggatgcaagaatcaatgagacttccaaaatttggatttcttctcagaatccatgaggctaagtctcctctccccctggacaccgcttggggagaacatgtcctgtctttgtctctggacccttctatctaaggtcccatggctggcaggtgacagattcccctcccctagttggtgttcccattctcacatttcttctttagctattttactgaacatttgatctgattactttcatgcttgacaggactgggacccaatctatctccttgtggtgctttaatttgtcttaattgagttcattaggcgttgattttaaaatgcaattttctgagggcaattttctcttatttccagagtcttggaggggactcttccaaggccctccaagggccctatgtgccattaacagtcaggaaaatggcagaagaaaaatgcttagatgaacgtagcagatgctctgttacgaaattttgcccaactgatgcctgatgctgtttctgtagtgctgtttcttgtacctgctcccaaatggtgcacctaacaccccagtgtgaccctccctctgcccttcatctccatgtacacacatgtatacacagcccaggagaactagttctgtagattatgccgttttaggcaaagccagatgagttcccatattccaaaaggaattagggaagggccagaagagcagagaacacctgttgttaagtgttcattcgccccggtgcattttcctagtgaaggtggttaggcagggttctagggagagactggaaggcagaggtcactgtggagagtatcctatagacaagatcagaaataggggaagggataagccagtctctatgtcatgcataaacataggctcagaaaggatatgcaaatgactcatacaatagcagaatgtgcacagtagctctgtttccattcaacgtattttctttcagaaaaagcatccaaaagttttaaaaggaaagggataaagaaaaatgtgaacaatggttaaatttaagcacaggacttaaaaatttaaatattctaagggaagccttctagcttaattgaatcatgtacatggggccttttcagaaacagctcactagattgcttgggatttccacgcgtttactacctgacttttggtcatcttgtttaggctagggttaatgggacaggttctcttcctcatttctccctcttctgagtgagcctattttcctaggctgtttggagtttttggataatggcattttatccacttggtcgttattccctgggaatgtatgaaagggccaggagccctgaacatctttgaccatcacctctgttatttccagagagacgtggtcattccagcctcacctgccggaggaggtatagtcctgggccaaggtgggagtggactgcagttagcagtggcacctggacttcacgaaacgggtcttagaggctagaataaggtgtttttcgatgaagagagacacatggaactcaatccacggcagggtttgggtggctccctcagcctggtggcagagaaaattctcaggttgcttgctctcattcctgctttctgccttccacccaagaaagcatagcaggctggctgtggtggctcacgccggtaatcccaacactctgggaggctgaggagggtggattacttgaggtcaggagtttgagaccatcctgaccaacatgtcgaagccccgtctctactaaaactacaaaaactagctgggcatggtgctgggcacctgtaatcccagctactcagaaggctgaggcaggagaatcacttgaacccctgggaggcagaggttgcagtgagccaagatcgcgccactgcactccagcctgggcgacagagggagactctgtctcaaaacaaaacaaaaattagccaggtgtggtggcacattccttagtcctagctactcgagaggttgaagccccacttgaagccaagaggcggaggttgtagtgagcccagatcgtgccactgcactccagcctggatgacagagtgagactccgtcaaaaaaaagatcaacacaatacattttcctggaccctcagctttccttccttattgaaacaaacatggatattgccttagttcttttttggttgctataacaatgccacaggcttggcaattataaagaaaagaaaattgtttgacttacaattctggaggctgggatgttcaagagcatggcaccatcatctgtttggcatctgatgagggccttcttgttgtattatttcatggcagaaggtggaatggcaagagaacactcaaaggagaaacagagaggaagggggctgaacttactcttttatcaaaaacctactcctgagttcactgacctactcccacaataatggcattaatccattcatgaaggcagatccctcgtgacctaatcacctcttaaaggtcccgcctctcaacagtgttgcgttggggattaagtctccaacacatgaactttgggggacaccttcaaaccatagcagctatattgaggaatacaatggaaattaagatgaatgtttgagataaggcacaaggtgttaacaaaattgtggacttttggctaagctggagatctctaggatatataaattctctctcctttgctccaaggatgatgaccttggtagtgaatgttgaaggtcacagagctgctgaagtggtcctgaatggctgtggagaccaagcttttattttggaaagatacagaacacccatggtgttcaccatgagcttgtgacttaaaaaagaatctcctgcatgctctcaaagcatcatgcagattttggtttttatccataatacatccctgtttattgtaatgtaagaataatgtttgtaattatctcctagtgattaaaataggaggaagatgtgctcattagtctgtgtgtccgcctgcctgttgtcaagtagtcaagggaccgggttcatgtccccagttgtagaatgtggtaaggtcagctctctgattctgttaccctatcccttgcttgcttcccaagtcaaaatttctttttcttccaggcgtctggggtcaggttagttcttcttgattgttggagataaatttgctgatgttcttcatcaactccaatgacttagttcagtatttataatctattttctgtgattccaaaactaaacatttggggtagcaacgaatataccattctctaccttctaagaagaaattatgtttgttttcaaataactttacttcgcactcattctacttacattagaatgaaacagcacttcctctacgtccataccaccctgaatgcacttgatctcgttagaatgaaacagcacttcaagtacactttctgtgcttttctttaattaaaacaactaaaacactagatgatgtttgttttataagcaagagagagagtagaaggtaaattttgcagcacttggaaattgtttgacttcttaggggcagttacctaagttgaagcagaatttagagctgagttaaagaatttagtcactgagatagttgcccaagttatacatgcagacgttgagctcagaacttccatcactgcctcccttccctcagttttctcactttggcccaagggctttatctagttgatcctggactggaacatttaaaggagattttatagagactttgatttaataaaagatgaatcaacagtaacatgaagcaaagttgtctggcttagatgtatagcttctttcatgggtctccaataaaaaggttggttcccaacaaatcttttatttagttggcaagtcatgtgcccatttccagtcttctaggaggaagaacctcatggtgtcagtcaaccatctagtcattagggtggcttcctcagagtcactggttctctaaaacttgttcctatgtgtgtcattccccaactttactattggtagttgtcaaattaagagagtattaggtacgaatacttgtgtttgtgtgtaagagacagggtcttgctctatcacctaggcttgagtgcagtggtgcaatcatgattcactgcaaccttgaactcctggcctcaaacaattttcccacgtcagtgccccaaccagctgggatcacaggcagatagtattttaacatttttattgatatgggaagctgcttagctctgtaccccagtttaccttacaataatagcaatgaagaaaaggtgagaagatataaaagaagacatatagtagggtgagaattggattcttaaaaatactgctcagtctggctacaactcaactatctacgcccaaatgttttctttgaagatcaagcacctacattactacaatatggggaggacataatgagaaactttgtggtatagagctgagaatggctcctaagccttctaaatcacagcccttagggctcccatggggaagtggagttcatatgccatgatctagcaaggatatcttccacctgagaaggtcatccttggaactggcaggtgccttctggatctgtgcatgtggtgaggggaaggaggtcagaggtgctggctgagtcattcggattagccctagtggtggcaggtggccttcatgtgtgtttcagctgccagaccttaacagacgtgcacattcaggcacatacttcaaacgggcagccttcaaggcaagggagaggggcgtggatacacttttatgcactgtggttttcaaaatgttacaagtaatacatgaatactttcttccaagtattctaaagctccctcagagtacctctgtgtcagtggaatgcccccctctggctccagtatggggactggagaatcgaagatacagaggaaattgaactcccttgaggccagttgggtaagaaggaagtgccatgtttcttagaagacttctggtgtttgtagatttgagaagggaggtgggagaggacttaggtgaatattaaaacaaacacataaaccaaatgaagacctctatctttccggcatcactaataaaaaaaaaaaagggagaaaaagctgaaagtaaagcataaaaccccagtaaacacatcagaactaccaaattagtcctctgcacaaacacacctttatatttagagctggaaccactttgggagtgacctttctcggaggttgctggcttgggcggcagtgggactctcccaagcgacaaacactctttagagcccccgtccgggacaccactgtatacattagttcatgttttctttggcttaaggaatagtgatggcattgcccttctgtttttccccctttcccaaaatgagtgctaataacttttatataaggaacattacctgttcgttcagaagtctggttacatactcccaggcagaagtgcatctccctggagagggagactgtgccatttggaaattattttaaattactgtttactgactgtcggcgaccatcagagcacagtaggaaactttgtagggagaggtgtgtcataaaaggcgtgacgtatcttttacaccctcctctcaaagcagtgggtgtacacaggataaatgcacgttgtagaaaaagaagtgtgtatgggtgcagaactttaaaacaaatattactaacagctcacatgtattgagggtacttgttccaaacatcgtactctgttctttaaaagtgctctctcatcgaatttcctcaatccttgaggtagttgctgttattcctattttagagataaggagactgaggttttaaagaagttcagtgccttgcccgaagtcacacagccagcaatggcagagtccacatgtgttgtgtctgactccaaatcccgtctcttggccacaagaggattctgcctctttctaactgagcacatatggggagctgcttcctagacattgtttctgtggtggtaaactttggagtttcaaaaaccgaggcacagggtagacttgaaggagaaactggaactgtgtcataattttagggtttcagacctagaaaagagtttgggattatctggtcttcaccttcactgtttttgctggagtctgtatgaagtgacttctgaaagtcactaaatgagtcagtggcggaactggaatcgagtctggacaccagacaccacctttctgccatttggccttcatccttcccattcccggagggcactgtctatcatttctgttacctctattcatcatttgatgtttactcatctggcctcactgattattttctccagtattcgtatcctatttctccaacaagattatacactgaggacaggtgctgtgcaacttctttttcaccaagctcacagtccactgcctcaaacaggtaggcattcaaatcctgtgattttagtgttgcattaggtgtgccatacaactgtgcctttcgggaagcagtgtttctagacttggctctggatcctgagggtctccccaaggagccgagtaggaggacccattcttgccctgtggcccaggctatagcccagcaaatatttgtggtgggtgcccaagaaatccagtacgttattgaagtgtccccagtgccaggcaaccatggtgccctctgggggatgctcaagttatcagctccactctacacctgggtggatttaagctctagtaagattttaatttgtaaacttatttatttttttttttaaatttcttgagatggagtctcgctctgtttgcacatcccaggctggagtgcagtggtgtgatcttggctcacttcaacctccacctcccaggttcaagtgattctcctacctcagcctcccgagtagctgggattacaggcgcccaccaccacgcccaggctaatttttatatatttggtagagacggggtttcaccatgttggccaggctggtcttgaactcctggcctcaagtgatctgcctgcctcggcctcccaaagtgctgggattacaggcgtgagccactgagcccagccaatagtgcacttattaagaatgataataaaaatgccattactcttacatagaacattctcttggcccaagtgttctcaggtgcactatttcatttcatctgtactgagctctcatgaggccattattcttattttagagacaagaaaaccaaagtgaagggggagaggggtactcaaatagcaaagagatgccatctgaggtcaggaagggattgatgagaaacagccttttcctggtacctccttggggcttgctgtgtctttttgtggtgtctggtgagtgtgtttgggtgtgtatgggctttcttccctgaaaccacaggccacctttgggaaaccaatttacagctccggttcacctcactgtaccttactccatgggctgtgtggttgaggatgtgtttgagttaagtaggctctagatagcacacacactcatttatttccgtgcttccctcacttcactgtagtgctcatttgtccaggcttattctagggaagcaggaataaatgttctcgcacttgtgttgtgtttctgtgatcagtttaattctgcatctcctagtgggtgttagactgttcacccaccacagtggcacctctaattctttttaaaaagcaagggaggctgggcacggtggctcatgcatgtaatcccagaactttggaaggccgaggcgggtggatcacctgaggtcaggagcccaagaccagcctggccaacatggtgaaaccccatctctactgaaaatacaaaaaattagccggatgtggtggctggcccctgtaatcccagctgctcgggaggctgaggcagaagaattgcttgaacccgggaggcggaggttgtagtgagccgagatcgcgccattgcactccagcctggacaacaagagtgaaattccatcgcaaaaaaaaaaagcaagggagactcttcaaacttaaatttcttttaatccttgacttaatatacattttttttatatgtcccccagacagcttctaacttagtaagggatcaatatatatttgttaaatgtgacacagacaattctatttttattttattgttattattatcattattattttgagacagtctcactctgttgcccagactggagtgcagtggtgcagtctcagctcactgcagtgttgatctcggggctcaagccatcctccccgttcagcctcccaagtagctgggactacaggcaccccctaccacacctggctaatttttgtattttttgtagagatggagtttcaacatgttgcccaggctggtctcaaactcctgagctcaagcaatcctcctgccttggcctcccaaagtgctgggattacaggcatgagccactgcgcccagctaacaactcttttttcaatctgtacctcttaacgacttcctagtccacacagtacagtgcatcgtgttgctgtcctttatttgccctaacactatcattaaagctatgtccatggttacttcttgttccctcttattgaatatttagtattcagtagccaagagactgtttatattctgcttaatcctcaccaaatttctgcaaaataagtagtatcgttacttttattaccactttacagataaggaagccaaggcacagaaagattgagtgatgtgctaaagttcacatggccagtaaatgacaaaacccatgctcgttcatacgtaccatgccactgtctctgtcagcttcaaggtgtgcttcttggggatgtgggctgaggcttagtgagctcgtctatttttgctgtgtttgtacagattcagcctcagcaagcacacagcaggcctggctgtgggaggcagtgtggtttagagcaaagagtatgatggcctttagcatttgttagtctggctttggcttgtactctgtcactcaccgcctcaccacattatttaattgagtctctctccattcattcattgtttcatccccgtgttcactgagtgcctattgagtgtccggaactatgcccagtgatacacttaaataaaaaacagacatggttatcaatcaagtgatcatagttctgagtataatgacaaactgagtgaagttccctgaacgagcaaaagccagtaaggaagactgggaggtctgggaaggtttcctggaacaaatggcgcttggtcagaggccccatgtcagtgggggaatatgaaactcttggagaactgaaaagataggtgagaagtgcgaggtctttcaggccatattcagggtctccaccttctttccaagagctgtgagtagtcatgaaacggttttaagcaactgtggtgaggatggtaggggctgccttgatcacacttggaagggatggagtggacacaggggccccatttaggaagtttttagtagctgggttgagaaatggtggtggcttgaatggcagaggaggtggagagaagcaaatgaacttgagagagattcagggggcaaactgccaacaagacatggcgatggataagatgtgaaggagtgccagagggggaggcaagatgcacaggcttccagcttgccaacctggaagggagggtaccttcttcattgagatagggaactctaggaagccccccacaccagattggtggagggagattgtaactggggcatgctcgtgttgagtttgaggtgtttttgagacatcagagggggattgttgaataggctttggttgacagagttctggaggctgaaagagaggtggggtagggataggacttggtgctctgtgtgtacaaagtaactgaagcagcccaggcacggtggcacatgcctgtaatcccagcactttggaaggctgaggcgggcagattacctgaggtcagaagtttgagaccagcctggccaacatggtgaaaccctgtctctactagcaatataaaacaggccaggtgaggtggcccacgcctgcagtcccagctacctggggggcaggagaattgcttgaaccgggaggcagaggttgtagtgcgctaagatggcgtgactgtactctagcctgggtgacagaacaagattccatctcaaaaaaagaaaaaagagaaagaaaaaaaagtatagatgaacttgcccaggaaaggagtatagagcagacgagacagcccaggactgagtttgcagaagaaactaaaagggagcagccagagagataagaggaaaaccggagttctgagaaagggcttgtcaagaggaaaggcaattaacagtttaaaatactgctgctgagatctcggtaatatgagatcctaaaatatgagaactgaaacttggttattgaactttgcaacatggcggtcactgatcattgagatccatttggtagagagatctaggcaagagtcaaataggaaagggtcagagtaaaaataagagatagggaaatgcagacataggggcaagacagcttttatgaaatctggctgtgaaggagaggagagagaaagggtttgcactggagaggatgcacagcaaagaagcgtttgtggcatttgtatgattagagaaggtgagatctgagtgtatgtaaatactccccgggaaggaaccagtggagacagaggagctcactctccaggagagagaatggatgattgaaaaggtaaagtggaactatcttctccataagactgttgtgaaaattaaatgagataacatgtaaagttatccggagcagttgctgttcctgtcctctatgacgctgtatatttttattgggtcgcttcaaaggttccatttttctgggtctgaaaagtcttaactattttttattcctctttgccacttattttctttctatagaaacatgctttcttttcatttaattaggtccattttaataaagggtataggagtttacaactcaaaacaattcgtaagaactatcagatacgtacgataaatcacgccaagggcgcaataacgtaaatccagtggtctgcaaatcagaggcattgtaaaaattgttaagattgactttcatgtcttccccctcctttctcttgttcacagcccgagattatgtacatattgttttctgaggcctgatgacctcaatactccttctggctggggagacctcctcattcagtccattccaaatagtcagcagagggagttcacctcttcttcatggaatgagcatggtccttgtcctttattatttggtttctgtctcctagcaaatgacattaaaacattttgcaggccttgtggaattctggtcactgttgccctccaaatgccacacatgagccctcaggatgagccctacagagtttcatccttgtagataggaagatgtgtatttgggaacgaggctaaagccatggccgatttccccaacatgctttctatttctattttcgttaatctttttaagttcaatttttaaaatcatctaaatgaatctaaacattctttagcaatttgcttaaatcatcttgtatattatatagaaatgttagatgcatttatttctagcctgcttactctgtatttcacataggaaccaaaaatagtctttccttcttcccagtttccttttgtgattgttgacatttttttacgtttcatcattaaatttatgacttatcttcttgtacctctgcccttcttattatctaagtccatcctatctatttttaaggaatatgaaagtatgaaagtaatcttcagtaccagttctttccaaatgaatcgactgtcttttcatggtgctcgatgggtctgtgtgtaggcgtctgagtgtgtgtaggcgtctgagtgtgtgtaggcatctgagtgtgtgttcggatcacgtgatagtaaagtgttcacagtgttatcacaagtgttattgcaaaataaagcttctctgtgccaggataaattttttaaaaattcatgtctcaattcagatattttttccagagttgctttaaaaaaaaattaacacatttggcaaaattcattttttcttgcaaactcctttgaactttaaatgacaatgttttatatgagcaagggggaagatcaaacacaaaagagaaggaagtgtagtaagttgatcttggaccatactttgaagtggtctgttttctcagtaggatgctaacctacagctaataggagcagctgaggaaaggagggaccagctgtccccaaggagcttggcagccttctaccttgggattgcacagtcacctcctccttgctggggctgcagagtttacgctgaggaagtgaaagaaggttgtgtgtttattacagtttgaggtgtacttttcactccaggaaggggaagcccctagaacttttcccatttggcaaggggtaaccaatgcttgcaaaccaagaagtgtagtcatggagatgagaaagtttagatgaattctgatctcccagccccaagcacctgttccaggtagctagacgcagggggcccctcaaggttgaaggtgtatggtagtacaccagatagcttttatggtggtccgcttttagcattttataaaaagtgactagtacttgtcttctacccactagtgtcataagaagcaaagaagatagcgggtctactaagttggatgttcttcaaatagatgatattttaaagtgcaaggaattattgctgtaattaatatagctgggagtgtggtggctaatttgcttgtttctctcaatttcttttcatgtgtcataactgagtgcttgtttgtagcttcctttgtaaatcagaagagttatttggtgttagaaactcagaattgtcagacacagtaagattggttgtgttttattataggatttaatgtcaagcctgtcattttgagtgatgagaaactgggaaaggcgtccttcactgacatagtaggagaaggaggcacttttgttttcaactccaatttggtctgaagctattaaaggaataaatggaggtcgtgcaacatgttgattttagactcttcccatgtctgctgctagaaggaacgtgaggagcagcttagtattttgttgtgtcttgcagacttcttttgccttaaaaaaaagtctgtttatggagggagaggacatggctgaaaaaacacttgtacataaaacagctgttaagcgaatctccacacactgagatcaagagaacgtgaagaaatatgtccttccaaggacccttttgccaacttggagcctccttcagaaaataaatacagccacgctacaagtttctggtaacttagttactgaaaaataaattgagctacttagacccttgaacctttattaaaaaaaaaaatctctgaattctattgcagtgatgcaaatgaagccagagaaactatgcagaatgtttctttgcccttgtattaacgaatgtgcccctgaagagtcttgaaaatgcaggaggcagaagccccggcctcctagtagagggaaagcacgtacacgcgtctttggtctctaagctccatctgcaataaggaaagatttcctgatagtgaagttttctctggatttttttttccttctccgtgacttgctgtggtaaaggacagttgtgctcagtggcttccagaaaagctggacgtcccaccatgatggcacatctgggcacaccacacctctcctctctactactgggaacactggagaggactgactgcctgtggcatatgctttgtgcttggagtgttgcttatgaaagatgaggcccctttaaaacctcatgctcacacttagagaattctggtcgtgtgctacagatgttttacagtttatttccaaacagctgcttttcccttctttagtctgtttttttttttttttttttttaaataaaatccctctggaaacctttcagctcacatccttggcaatgcttccttagtacaagtccttgcattctatgccatgacattctcccaaccagcacctgttactacaggcaggccatcgacttagctgttctgtgagttagaagtactattgtgtatgtggatcagaactgtagattcaatcagcctagaacagacagcccccagtgacaagccctccctagcacttcatgagaatacacagaaagaagaaggaaaaacttgacttataatgtatgtctccctcggaacatcaggtagaaaagccccatgcaggtgactcaatccagggtcaaagcagggagggtttccctgagggcacagcaatttgacaagtttgtcccatttcaaacttccccagcagccagctgtcaataatatctttgaccttcagaggtaggaagagcaggaataattaagatccacagatgatccccgaatcctggtaatgattttcacatccttctttctcatgatccttttccccagagctgccatttctctaaactaaagtgacgagtgtaagttcagcctcctttagtttcttttccaataatcttctgataaagatattaggaagaagtaaaagtccaattgaagagggcagtatcagggagggaacagaagtaaagagtttgggagatcattccttgaataactaagtgttgatcggctcttgggaaaatgtgttgatttgtcttctggccagttgtacatatgcagatacaccatctgtactgaaaaatatgcgtgaacttctctggaagcgcctgagtgagtcagtgtctgaaaaggagctacacctctaaaacagttatcaagtatttagggatgaggtgctgcaaagccaagagagtgaaaacaatccttaaaggcgtgtttggccagctctcaaaaatcttagacagttgcaacacagtccttggctcagacactggatttttcccattcatgtacttttttgacagatgaattgttgcaggctgcaaaaaaagctcgaagaggaatctgttagactcctcactcagagcagggatctatttgcttgcaatcctgttagcaaaccaaggtgccatttgctttgtgtggtgtgctacttggccactttttcttagccgtggctgctctgtctgaaacggtcatggtctcattcagctctagcatatttgcgtgttaggttggcatgaagattctcaatttagtaaatgctagacactagtataacttccctgaattcctgcctctcaactcctatggaatgtttatggctttcattatagtaataacaagatttcttgcacaaaaactcacttgaccttggcactttctttctagagccatccttcctttttgctgataggtgggtttgcatttatttttggcatgactttttcaccttctgaattgctgactatggtagattgatttttttttttaaagaaacgcaagtcattttgatgaaacgatcaacccagcctgatataactttaagtatagtttcacaccacatgtaataaatgtgaccctttagagatattagaaactgatgatgaatgtttagttacaagaatagttcagaccctcaggtatgggtattctttgcacaactctggaatatatttcttgaatcactggaagaagatggagtccttggaaacatgttgtcaggggctcaattacctttagacctttaagtgttcttggccaaaggcttggtagtaattatttgagggcattagtgatagaccacatgttaaggctgtagctgaaaccaagagtcatcatatgcatcctgtatggaaagaactggggatcatacttcagtctttccagccaaactatgtgtataccatcactaacttaagaaacacagtgtatgctattgtgtgctggtacacaatggggaaaatgactggctgccttcaaatcctgtcttctatgtctaggctcaacaacgggggacccctctgtatgtttttatgccgagaactaaagaattttaaaaataaacttggatagttttaaagggtgtaatatcctatgaattgtaacactgtatatatgctttaagtgtattatcaaagagtcaaagttatggacttttctccttcatacttggaaaatgttcatcattgtaaaacaaatggcagcaaaaccagtccttaggatgaagcaaatcagaaggagtgactttgtttttaaaatttaagtaaatgtgttaacatgtcatttcaaataatcatcttgcttctgaactaaaattcctaagatacgtagatagaaaaggcagtgagtttgtcacctggtagaaataagatccctcccaccccttattccatcctatctctgtttttttttttttttttaaagtgttctgtgctttgctctccaaggtgcttcctcaggaatgcattgtcaaattactccttgtatttggcaacccaaggagctttttcctccagctttattgaagtatagttgacaactaattgtatgtgtttaaggtatacaacttgatgattggcctatgtatacattgtaagatatccagtacaatcaagtaacatatccatcacctcggtgttgttaactatagtcagcatgctgtatgctagaccttcagaactcgttcatctcgcacagcagggattctgtacccctagccctacgtctccccaaaggctttactacactggtcagtaaaggggaggaggaaacgagaactgaatgagcaatctcaggctaatcggtttcaggaaggagttcatatggaaactgaggttctggaaatgtaatctacttttaagaatcaaccacacctgtgcctcctccagaaaatctttgtagtgcatgactcttaccaggcgtatatgtagaggaaaaggtcaaagaaaaacatttccaaagatactgtgaaaaataaaattgtattttatcatagaattataaaaggtataactggggaagtttaaacatgggtagaaaaatggaaagaagaatgagacccatgagacggtaattcacatgaatcattgatgtgaaaatatgtggatgatattgaggggcagatggacagacaggttggcaggtgctcctggagtctcatggagagggggtcacttgctcccaagcagccagttccaaagtgtcttgacggcttcctttctggaagtactcggggctggttagtaattatttcccagcttatgggatttcttagactctccctggctggccttttaaaaatgaatgaccctcctatcctttcaagatgaagcaggctctttaggccctctgataccccttgccagcccacactgagcctgtgggacctagagacaggcagcttttcacaccttctggattgctgattatggtagactgatttttttttaaataaaatcaagtcattttgatgaaatgaccaactcagcctgatataactgggtctgctgcaggagcaggctggctgggttctgtgtccaaagacctgggcctgctctgttgctccttctcagggttgccagtgctgcttggcactgttcagtgtctgtggaggtgttgtctagggctgttccctctgtccattttctgtgagcaatacatgccccctgctcctttccagaaaccacttgtattttactaattgctacagtcagctttctgaacgtgggccgcttattttgatactggcttgagaacacacacaaggctgggtgcagtggctcacgcccgtaaccctcacactttgggatgcggaagcaggcggatctctttagtccgggagtttgagaccagcctgggcatcatggtgaaactccatctctaccaaaaaaaatacagaaattacccaggcatagtggcacacttctgtagtcccagctacttgggaggttgaggtggggggatgacctgggccctggaggtggaggtttcagtgagctgagatcgcactgcactccagccagggtgacacagtgagaccctgtctcaaaaaaaaaaaaaaaaaaaaaaaaaaaaaaaagacacacacatatacagctgttcttgttggggtgtgtgtatattaagtttgttttcaagtaagcttctctgcctcctgcccttctactggttgataatttttctagtatctatcagggacagcaggttgatggtgttggcagagtttgtccgtagcatcatggtccttgaggcttttgtagtacaaacaaaacagaataccacacaactaccagttctctcactccataggacatcgccacatggcccaatactccttcttgcaggtctgtccttgtcacacggaggattctaacatgattgactctgttgggtcaatttctactcccagctcttctagcctcacaaatccacttatctccctttccatttgcatgttcgagtccaccctttctgtaggctccttcccatgagcatttatacacgcttgagtctgtctgacagaaacctcccttggccccttcaccctaaagcacatgtgttctctcccctctcctccgacaaaatccaaaagtatggtctacactcatacttcccttccttctcttctgctccccttgactcccttgcctctggtttaccccaccagagggtggagggggcatggtcacttgtatgagaggatggcaaagttccttctttcttaaaatatgtgacttctccatcatcccagagcaaatcacatcctgttccactacttatttaactaatgtcaacgactttggacgatcctaaagcattttcagtagacctctgagtccctcctctgtgtttgcgtccactcccactgcttcggtgagatggatcagtgactctctcattgccacatcttcttcctgtggggagcagcatcttcccctagcttctgtgccaccctatctctgtctgtcacctctacagtcactgcctctggccccttaaatgttagtgtttttcaggcactgtccttggccctctctgcttctccatcttcatggcaacctcacctcctcccagcgcttcagttggtccttgagctgctgccccttaacccagaattctgtctctggaacttttgactctcctaatggcgctctgaacatcactacctggaagtcccagaagcccctcaaattcagcatgtaggaaacttatttcattgtgacccccatgcctgccactctttctgtgttccctctccagcgaatgacgttgccatgtactcagcttcctaagccagcaaaaagggctttatcttagattccttcctacctgttgtcttatccccagtttcaatggccaaatcacatccattctacctcagtatattttatatccgtctacttatttttatcctttgccaccctttgcctcctacttaagaatcaaaaaccctgtaagacttccttgacctcataagaacaggttagattcttgtatcagtcagagaaacaggaccaattggatggatggatggatggatggatggatggatggatggatggatggaaacttattttaaggaattaatcttgaggctgacaattcaaaatccataactgcgggaggagggtgctaacaattctgaatctgtagggcaggctgtaaactcaggcgggaggtgatgccaaagtgtcgaggtggaatctcttcttacctgggaaacctccgtttttgctctgaaagccttcaactgggtggataacacccacattatcaagggtggtctcctttgcttaaagttaactgattgaggatattaacctcatctataaaacaccttcacagcaacacctagattagtgtttgattacataactggggaccgtacccttgctcagttgacacgtaaaactgaccctcacagttctccctctgggtggatattcccacaccacacatcttctaaacagtattttactatattgaagtgggctgtgtactcacctgtgtcccccactggactgcaggcaggtattatgtcttgtccacctaatggctgcataaaataggaatacacacagacatacccgactcaaacagatacaaacacatagacaggcacacaggcatacccagatgcgtctacatatctgaaagtgaatgaatgaatgttcttagccttctgttttttcatggatggtctgtaggaagcaacattccaacaaggcagagccagtaacagaggatgcttgatggcagggaatggttgtcagatatgaaaaatgtttcaatgggccctacaaccaacatgtggaagtttactctagcctaggtcttgattcagccatagcagacaaactgcaagagggaaaccaaagacaagatgaacccctttgcagctgagtgtttcatactcaagggtctagtaacataaactaactgttgtctaccatgtatcagatgctcaaatatagttacgtgtttttttcattatgtagcaactgtgcatcttcatgtcacaaacttgcaagaaatagaatttctttattatcttataaattggtttgtctcacttgtcccacttctgcctgatgggagaaacttgatatacagttaatgccaggaaaactcagtcgattaagagtttttttcaggtaagtcttaatattcctgtagatgaatggataaacaaactggcacatccagacgatgggctattcttcagcactaaaaagaaatgagctttcaagctacagaggaatatagagtttgctctacatattgttaactaaagaagccaaactgaaaaggttacatactatatagttccaactgtacgacattctgggaaaggcaaaactgtagagacagtaaaaacattagtggtggccaagggtttgggggaaggagggatgaatagatggagcccacatgatttttagcacagtaaaaatactgtatgatactacaatggtagatgcatgtcattatacggttgcccaaacccatagactatacaacaccgagagtgaactctaatgtcaactgtggaccttgggtgataatgatgtgtccgtgtaggtccaccgatgataactaatgtaccactttggtgcaggatgttgatatgggggaggctgtgcttggtgggaggcagacagggggcatatgagaactctctgtaccttgtgctcagcatagctgtaaacccaaaagtgctctaaaagataaagcctattaaaaaacaaagtcttattagtcctcctccatggggttgcttttcatttatggggagttcacatggcttcaaagaagtgagaggcgtgtgaccatcctcagtcgccatgattccagatatccacgggctgtcagtcttctcatcttgtccccaggcactgccttccctcaaccctgatgcctgctgatgtgtctgtgtttctgcctgagccccagccacctagtccaggctcgcatctgctgctttcatactgcatggcattttcagagctgccagctgcctattccccagcacaggatccacaggcctatctgggagttctgttgctctcattcgcaagctctgtccatgggtaaggctcgtactcagaggcctgtggcactgatgctcttcactcttgctccttatggccccttgacttggagattctttttgtgtctgggaaggagtggagggaggtacacctggctcagcatgtgttctgtcaaacctattacttatcaagggtcttgactcttgaaacttgaaagccaaaagttgggccatttggttctcttgttctgctgtaaggatttctgtctggaataatgggttgcttcatgtctagtagcccaaatagaaaagtgtcatggggtaacaacaagaatgtacactttgggagaggccaaggcaggaggatcccttgagcctaacagttctagaccagcctggcaacatagcctctctactaaaaatttttttaaaaatagctgggtgtggtggctcatgcctttagacccagctcctccagaggctgaggcagaaggattgcctgagtccaggagttccaggttgcagtgagttgtgatagtaccacagcactccaggctgggtgacagaatgaaaccctgtcccaaaagaaaaaaaaaaaaaaaaaggagaagaagaatgtaaagggtatgggaaagtaatatgttagttgataccttacaataaatttgccacatttacaaccttaggagatcgtattctcagccctaggttgaaggtgaggaaatgtgaggcagggagttggaagagccttcacttgcccagggtcgtaagtgataggacagggatttggacacaggttggtctgacttcactgtgccatactgctcataagaagagaacatggaggaaggatcactttctaagggatacccaacagtgtgaaaagacccatttatagtatttctgaatcctggaaaggctctccctattctatagagaaattttccaagacctcaggattccagtactatccatgggaacacaggagtccttgacaggaaacatttatgtttttccagtttattaaactgcaaaataacagccacccagttaaggaaggaaagcatgttgaacatctctttgccaggcacgggagataaagctcctgctgtgttctgggttttacagacataaaggaaatgaagcatagtccccatgtctgtaacctttcatggggagaaacacaagggcagacaattttcattcatccccactcttgagattttgaaagaggcatgtgcaagggcagccagaaccacaaggaaggaccctggcctggtctgagatggtcagtgtgggtttttgaaggacagagtcaagtcctaagaagaaggaattggcctgggaagatgatctagagagtgtgactggggagtgctccaggctgaggggatggaggaacaaagcaaggcagtggtaaaacagccctgttagttcagggatccccaaggcagagggatgtggctggacagagaggcaaggtcctggctacaaagggctagtttgtcatgaagccacttagattcaaccccacagctgatgacaagccattgagggagtttaatcaggagcgatgtgaccagacttgtgtttttaggtacactgctgggtggcaacgaagagagtgcatgggatagaacttggagaaggagggccatcacattgtccagcagagagatgagggcctgggctaaggtagggatggaacagaaggagagcagaagacaaagccagaaaaccccggggaagtcaaatgagtgggacttagtgctgattggaaaggggagagcaatggtagggaatgaggtgttgaaggtgactcctgggcacccatcttgaatgtatgggtggatggaggcgcctctaaatgagagagtgaggagcaaaagtagatttgggggaaaacatgatgagttcagtttgacatatgttgaatttgaggtatccttgggagatagcaagtacgcagttggagtcaaatctatcatttgtaagaaaggtgatagagatttaggattggaagtctatagcctggagtaagagttaacaccatgagggcagatgagattgcccagggagagcacccagggtgaaaatgaaatagttcttgagatagacaaagaagcaagcagtgaagaggatcctggggaggaggttggacacaatcagacatctatggaatctcaaaaatggaggaggccagtgggatcagtaatgtcacattctgcagagaagtccttaaaaagaagagtgccatctggattgccagagggaacacattggtggcccaagggaggaatgttttggcagattttatgaggatgaagccaaactgccaccctcgtggccaagatggccttgatcctgtcgcaggaaagtcccttctgtgcttggtagaagaatagtacttttttcaccctgttccccacactgttgcattaagcatgctaaatagcatcacccccttcctcatctataggaatattaattttaggctttgtcttgctgtcacaatattttaactaatttttcctaagttcttatcaggtacataatggacattctaattagaaaaaaaccatccgtatgccctaaaccttacctctgagggtatcttcatagtgaagaagtttctattttgccagaaaaaaagcgatacttataaaataaatgttttctcttttactacttagtagaaccaatacataatggaattttagtttcatttcataaaatatttactctgtaagcaaattaaagtgactttttttaaacaaaagaaggttgctgtattcaccattgaatcaaatctttagatttccaaattagtgaactaattctgtgaaataatcatcttattcaaagctattcaaatctttctggataattcgttctgtttcccaggtatcggcacaatcataggctcataaacagaactccaatgcgttgtttctgtttctctttgtcatgtgatttagggtttatttttgtttgtcaatttaaattctaagaatctagatctcagtgtctccttgaaagaatactttattaagtactacctatttgtaatatgtttcaatgtagactaaccaacccaataatgagtatttggtaaagcaataggaaactttgcagtaactacaacaaatatacgtcatcatactctttgtggagatgacacgctggaaatttcaggtggtgcttatttttaaatgtatgctctatttaatgtgtccctaagttctcagtctccaaaataaatctaacacgggcagcacccccctcccatccgccacacaaaacatgagctgttacacatcccgagtaatgaagtgtatagtcgcttcagctttctcttggcatccgaggctaaggagctaatattctaagaggtgatgtattttaatcctaataagcacctaagaattcattgagtgaaaagttaaggttagcaatcaaccttggcaaactgatgcttataaattataccaatgtgaaattgtgtttgaggtgagaaacaagagtgggtgctgagagggagtaataaaccatccaactgcaaatggcgacatttcatcacaccactgttctcattggacattattcacaagcatacttttgatttatttttctcagtgggtctgtaaatctctttcttggagtgcaaattgcatgagtagtaagttccatgtgccaggagatggcttggttcatctcttagaccttgactttattaataacagcaacaaaaagaagagaccgatacaagttatagagaacctcaaaatgaaaagcaaatttattctagattctacctttttgttttatgtgtgtttttcttttactaaacaatcttatctggtaatttgttccatcatgatgctttgagaaacatagaaactggttattgaaaagatcagatgtatacgttgatttttgtaaagatcagatgtccttcccctaagatagggtgacttctactgccattgtgttgtagatcttgtgcctgtcattctttcccttaagctaaatatgctctagtactctctctaagtctaatcttatagtctgttaactagttgacttgtttggtggggtgtgaagtaccaaggagaccaagtcttggatttaatgatgacaaaagtcaacctatattccacatatgtccttatttctgtagagtccattaggcttcttgtatttgaaggccacagggtatacctttaggccactcagccaagttcttgccatgagtcacaaagcagaaccagatgtaagaccagagggtgaggacttcgagcccagcggggaccacagggatggtctggaccactttcctcaccttactgatggtgaactgaagccaaaagaggtcaagtccctgttcgcagtcatgcagccccttagagttggctctgggtgaccacccttccagtccagcactgtttctgatacagtgcgcatgagcatctcagcaagtatctcacatcatttttgcaaatgagcaaaaccacactaatttagggttcgtgttctacctgttcccaacagtctgcttcctacttccaatgccagtgacactttgccagtcccattcatcttggggacaatcctcagatgttccttccacactcactcactcggcactgctgcttgccacacactgtgctttggttgcaggaacaaggacagacctccacctgttgagaaaaactatttcaaaataatccttgccaccacaccacatgtagcataaggaaaattataaagtaattcccttagacttagactttgtaataaccagctcaggaaccagagaaacccctgctagggttagaggtgactttatttcacagattccatggccagacgccagagtgatacagagaaactcggaacgtggtcaccagtgggccttctggcaggcctagggagattggatcatctcattacatcatttttaattattacctcttgacctcactcactttctctcaccacatcatgtactggttttaattggtcagtagccgaagagtaacaagcttactcgaaatttccaacatagaacatgaaaactttggctactgcgaattccaaggttttggatggcaaaaatctggcaatgactccaaaggagggagagaggagagagcagcttgttcaatggaataacctcattttaaggctggagtgccaagctaatttgttaaaattactatactcctttctcaattatccatctcaaggtttatttatgttgtggatttgtgatggtcgccacatctcagccaatcaaagtaggggacagggtcaggtgcgaaatcagtaattctgtataaagtagaattcagaaaactgctagtcacttggattaattcagggaagtcctgttcagattattgaaaagatcaaagttatgatttctttttttgaagaagggctatttgattccaactgaatgttagtgtgccagttatttaactcttctgggccttccttataaataaggagtatagacaatgatgaaattaaggtctcttctaggcaggcatcctataagattagaactattactttgaaatacctacagcaactggtaatgagctggcagagtagtcctcaccgctcagcttactttaataaataagcagccatgatttatagttgacaagagcaccagccaaaatctattctccttgacttatagttacactgattataaaaaaaaaaaaaaagataatgtctctggtgcttaaaagcatattatcatagagtctttaaaacttgaaaggattttgattttattctctactctcattcacagttgagcctgtgccctgacctaggtgtcatctgcatttgcttaaggaaccgatcacttattgataggtgcaaatgttgaagggtcaggtgtcatcaataagcatacattccaaaatcatgaagtcctgaattgatgaagttctactgcacggttcttttggagttgtttatattaactttatcaggatatcttctctcatccaaaagagatgagtgttattacgataaaggaaggggtgtgtgtgtgtgtgtgtgtgtgtgtgtgtgtgtgtgtgtgtgatctaaaagaagccaccctggcatatgatttcttccctcctcacatacccacttccaaacatgtcagatttactgcaatcctttatctcagatgcctgtactataaagtgggataatccttatctttgctacttcacagtgagtagtggagacaaatgagatagtaaataggagcattctttgaactcttatggagagagcttttaaatacagactttaaaaaagagtcagataattccagtggaaaattttgtagataatcaataatgtccataaaatgttacattagacctcacatctccttcacagaatggcctttgtccctgtagcctgagtgtctcacaaaatctctaacatttatatcctgaaaaagctcttcttctgtccctcccctgcccatggtgtctgggaggcccagtctaaaccatgtctgggtggcaaggtctttgttttcttcttattaagctctgggggtttgattgtagctctcccctactataaaagcacctttcttttcctctagggtttggggatggattgatatatttacttctagttatcctggggttccttttattattctgtcttatttccatatgcaggagcatgatagaagtatttattggactttgttttacaaaccaaccaataaattgattcattaaaacttcattaatttaaggaaattatatttaacccacattttctagggttctagggccaatgatttgtcatttgaactggctagggttaggttttcaggctgtggtcataaaataaagcggggggaggggggggcacatgtccttgaccttggctccagtcagtcaagttggtcagtgccaccatgtgtacttccatgagagcttgctgcaggtacctaagtttttcagaactgagactgttctcatctggccacttaatttggaggaagatatgtatctcagttccagaatgtagtaacgaaggcaaaaatgaagcaaaatatttctaaattgatgctctctcctgcacaaatgaatagtattcgttcactttgggtggcttggcatcaactttttaagacagcatttattaacttgaaccgaatcctcttaaaaattttcttgcataatttccaaactgctttgtttactgttttcttgaagaccagtcctcttgtttttggcattggctgatactattggacttcaatccagtgcttcatcgctgagcggtgacgcactgagaaactcgatagagaagcacctgcagttagtgacgctcgggtggactctgccaggctggatctgaataaatccttaagagcaaacccaggtgaacaggaaatcatttccttctggtcaacattgagctctgagatccatagtgatcaaatgctgaggtccaggacagttgggtgctgccaagtcacgtttcatccacaggcttggcatcaccttgtgacctcagtgggttctgtgaaatagctcaggggctgaagaagtctgtccagataatagagtagtgtcagagaaaaaatttcccaccacttttccctcccagtctgggagatgtgtgccaaattggggtgggtgggaagctgaagtggcttgcagaatgcagcatgaacacagatgccttctgcctctttgcaaggtttatggagaactgagacatgggggtgctgctcatgatttagtgggctcctgagccacagtagacacaacagatgttgttcttgttggcagaagcaacggcctgatatcaagcaatatggggtgcagatggtcctatactacaattgatgaatccggtcagcttgctctaggtcagggagacataggcactgcccagaaattcatagaaggccccttctgtcagggagatgtggagtgcccccagccagacagagatccagagggtacattccaaatctgcttcctgaacacagaggacctgccaacaggccatttagaaggcatttggtggaatgctcaagagaaatgcagcctggatgagaaccttatgtgagccatttaatttgctacctaactcagttcatctctttgtgtctgttattaaagaaaaagctctaaagaaaagcttacagatattttggatttaagagaagagtatgattgattatataacggagcccaatgggaagagtgtcttatttgatgttttccctcattcaatcattaaatgttaattgaggacctctgttctcagcaccagctatgatggtaatgaaacaggtatgatccctcacctctcccttgaggcccattcagtcatatgatggagcagcattcagagaccaatgatgggcccaatagctgttctttattgaactgtttcccagacgttgtaatcctcacaagtaaggggtttctaataaggcagtcaaaattaatggaacaggcccaccgttcagcatgacactagatttgtggcgggattgagtgaggacaacactatttgatgggcttgcatcagggagggaggaagacagggcagtcacttgatgaggagggatgggtgctgccatcagcaacaacctatgcaccttctgagcaggtcactgaaaggagaggaaggtggcagtgtccttggatggactgagacttgtcctttgattgtcacctgacagtgaagggtttcctcatcccagagagacattcttaggcaattgccttctttccagatggtgagactgagtaggtctggggcccatctggccttctggcttagagctgaatatgcggtagggaaggagggggtcagacactcatttattcgttcaccgaatgctcatagaatgcctgctccctgcaggtgctgtgggatacaacagatgctaagagagatatggttgctatacagatgaacctttctttccaaggagggagacaaaagcaaatcaacctgggaagaaaaacacttgaagttgtgatgggtgctaggaaggaagcctgcagaggcttgaatgggaaaatagtagactcgggatggggttggccagggcaggtcccttcctcccagggaagagtggcgcaggcagagggagcagcgtacatccacctcaaggtagaaagaccgtgactggctcaagcttggctagagcatccgtggtcaagagcagtgggacaggttggggagggaggtgacggccagatcattgagagttttagcttccttgaaaaaaagtctgggtttggtccaactcaaatccactgaagggtttgagcatagctgtgatgtcatcctagacaccactaccacattaatggtctctgtgggttatgatacaacactcaaatcttaggggattccccactgccttctcgttggcatcagcttgtcttaatctttcatttcttcccatcctgcaccttaagctctaacctaatggcaacctctactccctacacattcacagtctacttcaagcctttgtccatgccactgtctccacctacagaaaactccccaccctgcaaggcctggttcacgtggcatccccttcaccatgcctctcttttgtagttttctcggcccagatgtgatcgcccttctctgccagccctttgtaacttatgaataccgctatatttcattgatttcaagatgcaccatttttttttcacatttaacttgcgaaatcaggtcgggcctaacaattgctagtgtattgtttaattggccatgcttttcctctcttagcagttacataaatgaacgctgcattttactatcactggcatattagattggatgaaatatggtaattaatttttaccaggtactacagtaatcaatataattgcattttcccctcttgaaatcagatctctgagcataggagcacatggtccccctttcagtatcccaaggtaagcacactttttgacatgcaaagttggtgccctccaatgaatataaaatgctaaatgagaggaaaatgtgcaggaaacaataagggatttgttccagctggatctgacacactaaattggagcattataagagatggaaatgtctagagtgggatgagtgacccgtttagtagtaagcccaaatgtcaagctaaggaattctgatctctcaaggattatcccacactgtaaattgcaggcaaagccatcgggtaggaaattaaagcagaggttaaagtaacttttttttttttaaactctcacttaaaacttacatatttttaaaaattacctcctcttctcattagccatctggccatgcaaactggctttcacactcctttctttctttctttcctttgcttttttctttattattcagtagaggtgctggtttatacatagtgattgtcaggacagagttttcaggcagctctatgactattgggaccagtcgccaaagtccttcatttaaatgaccaatttcacattcagtctggacttcaatggggatgaagattttagaacccgaagacacatgggtaatgctggaagtctttttctctttccctatgaatggaaaattcattcattcatttagcaaacatctggtgtcttttacgtgccagtcacagtgctgggtttgaagaatacacagataaaaatatgctcggtcccttcacatagcttctattctaaacacaaggagagtttgttagtagattatttctacagtgtcatgtatagatgtatagactaccttctgtactggattggtttaaattagatgatttccatgatgggactagaggattttaagaatattttccaacgctttctacaactgatttttttttttcttagtgtattaaaaaacacagccattgcacagaaataatctcccactttccaaccaacctgatgcttgtaaactccctctcaggtcacaccagagggacgaaatcatttatagaaagcaaattactattaaatcctaagcaattttattgttgaaagtttaaccctatttatataatactgtcattgatgtgatgtaaatttctttgcccatttcaatgttttgtccctagtctacagattctattagatccagtagacagtgacgtgaaggattatgaatcctccctgaggtcttttccgtgtaaaagagctctgttggttgctcatctttcatcttttcagtgcagccagaataatcgctgagctcactgtccgtatcttatacaatgcggacttcataaatgttatcttttggattacagagctgcacactgacacacaggtatgtgaagagatctgtatctattcaacacacacacgattattatcttggttgtagtcaccttaaaaagtagaatgaaatttgtgttattttaatgagagatactgagatgctgctattctttgtggttttctattaggttcatttaaagaagcaagcctgtcctgctgtcttattttaatggtttaggacggatggaattttaattgtatagatgcagcagatcctttggaaggaaaccggatctaccccattagagtttcatagaggtttcagataacagaaatgaatgtgaatcaactagcgcctatttcattatgactggggaaaacaaacagtgtcaatatttggtacaagagctcttccgttttaaaagagcaacttgtaagagccatgtaaggcaaaataaaacctcacaaagagaattctgagggtcggtagagatgataaaatactctagcacagaaatcaaaagaccattaaaatcttaaatatgccatgatttgaaaaacgtcccagtgaggcttcccacagtaagcgaggtcatcatagaaggcacgtttgaatctgtttatctcgggttggaatgacacatgactgcagccacattcaggctcattactgctgaagtgtgaagtgtccacttggaaagaatgcattctttcacacataaagattgctgcattctgagatgtggggtcagcaatgtggttggatgttttttaggagattaacatcgaacatattttctacaaagcctgctcaacaagttaaccacttggtgccagcctcctgggggccccgacatggggcaagcactgctctggggatttccagcatcctgagactttccctcaccctcacacatagcagatcagggtcttcaagtgcaggtgacacatacattgtgatccacctcaacctgatgaaattgatttctcttagtacctattgcttctacatgtgaataggcaatctataagttacattccctgtgtcccatttttaggattactaaccagctgattgcccatgtgaggacatctttatgagtgtttgcattatcctggtgagaatttatgtagctcttctaatgtgtaaattgctaaactttttcttcccctacctgaaattttgacttacatgtgtatggcttttgtaattgcgtgaatgtattctattggctattgatggtttctctgattctaggaaacacatacttctgctgatcctgacaaccagaaaaaacaaaaacaaaaacaaaaaaaaacaagtgatttaaacaaagcaagtacaaagtcattacagagatttcttttttttttagtatggactattcttagttatctttttcttttcttgggttggataattttaaatattttatacatcctaatgaaattaatattttccacttaaaatagcttatcttgttgaactgtgattggattgctaaataatttttaaaagaagattaaagtttcatgccttgtcaagaggccaattaatgtagcacagctaggcaggtaggaaagaaaaacttcacctgtcacaagataggaatgtgttggttgatactccctgtcttcctttgaaatcataccatcgaaatgaaagttgtccctagttttaataacctcctgacaagaggattccactgtttctctgctatcccatttcaatatttaacaactttctaaaagtctgagcatctcttgcttcagattgtcaatttttctgttattgttaggaaacagagggtcattctcttacgtaatactctccttatgattgtggtcggggaagagaatggtgccccacaggaatcttagacctcctgttctatctccatcctttcgatatacaaagggcagcagttctcaaagtgtggtccatggaccagcagcatcagcatctcctgggacctcgttgttttttgtttgtttgtttttgttttgtttgtttgagacagatttttgctcttgttgcccaggctggagtgcagtgacgcactctctgcttattggaacctccaccttccagtttcaagtgattctcctgcctcagcctccagagtagcacaggccaccacacccggctgatttttgcatttttagtagagacggggtttcaccatgttggccagactggtctcgaactcctgacctagtgatccgcccaccttggcctcccaaagtgctgggatcacaggcctgagcccacgcgcccggccgggaccttgtttaacatgcacattttggggctccatcccagacctaccaattcagaaactccaggagcgggtcccagcaatttgtgtttctactggccctccaggtggttctaatgcatgctaagtttgaaaacccttgttatgttggaggttagagtcagtcagaaagaagacagagcaattcaaactacccaaagaggaatggacagccttcaccttccattacacttcaggtacactttgaagacaaccaaagaatgcagacattggcctgcaaatgcctgtgcctgcaattgattgcagttctttttgtattactaacgggaagtctttactttttttttttttttttttttttttgagacggagtcttgctctgttgcccaggctggagtgcagtggcacgatctcagctcactgcaatctccacttcgcgggttcacgccattctcctgcctcagcctcccaagtagctgggactacaggcacccgccaccacacccggctaattttttgtgtttttagtagagatggggtttcaccgtgttagccaggatggtcttgatttcctgaccttgtgatctgcccacctcggcctcccaaagtgctgggattacaggcgtgagccaccgcgcccggccttaaatgttaaaaggaaagaaaatatgcatataaagagattgcacttaaaattagtcagcttgtactttggttggtagaaaacaaacttctgcaaaatctgaagatttactgataggtggatgaggaagtatttctgaaatgtgttaaccactcatttcatttaccagaaactgctcagagcctcttgggggggcgatcattgcaaacttaacaaaaccaatcgcctgacatttctgcattgcacataacttcttaagactgccagttctgaattgtccattttaaactttgcatttattcttaggacatgggaagtctaaagaagatttggatgttccccgaaacgctttccttcttcatttccaactagcaccaaacttttgtctgattttatttaccttcaaaaagttaggctgggcacagtggctcatgcctataattccagtgctttgggaggctgaggtgtgaggattgcttgagtacaggagtttgagaccagcctgggtaacatgacaagatcatgtctcaaacaaaaaatttaaaaattagccagtgtggtggcatgcttttgtgatcctagctactcaggaggctaaagcagaaggattgcttgagcccaggaggtggaggctgcattgagctatgatagtggaactgcactccagcctgggcaacagaacaagaccctgtctctaaaaaaaaaaaaaaaaaaaaaaaattggtgaacattcacctactctgatcagaggcatccgcttcccgtgagcacttctgtgccttgaggatcctgagcacatgtgatcataaggaaaatttagggctaatttttaaaaacataggggtttggtgagggctccatttcttccaatgggcgtatagtaccccccacccccccccaaaaaaaaaacgctttttaaacatgttgactaaaaaatgtaaaagtgataacttcctttaaaaactttgggctggagtttatttaagtggaactttctggtagctttttgcaacctgtaataaactcattggaatgagtgggaaatagatatcatgtgtttcctgagccttccttggatccgtggccaggaaaaaaagctgctgttcaaggggttaatggtgtccaaaccttatttatatttgtgtgattagggatgtgcaaaatgtgcctcttgcactcaatccaggtttgtggaagattagctgttctaaacagaaatggaagaacagcccagaagaattgtaaaaagaatgcgtagcatgagcaacaggattttttttttcctgtgtgtggctatgtagaggcggaaaaggatgaaatgcggtttaaaaattaaatgcagactaactgctttcctcctctgaagaatgccagaaaacatttaatccaggagatactcctgaccattgaccacattccacccaccaccattcagtcggaagcttcagactccgtaaaataggcgaacatggttattactgcaaatgctatttgttgattttttagggtcgacagcccaatggctgaacagtgcatgattgagtatgaattcatactgcgttcagcttgcaaaaaagacttgctatgtacaaagtagcctcatcggtttgaatgcttaggaatttttctagggaacaaaacattatcaaagacagcaaaattaagggaaactgagtgagattattaaaatagatcatattaatgccaaaatctcttgtacaaagagaccacttatatatttattcactgagcaaatattcattgttacctattctgcacagctagagaatgttagctcaaagttttcaaaccatttttttaaaacaaagatgtttatatatcctctacagattcctaaagttggatcttattttcttggttaattgtatgtattgatggggaaaattttttaaagtcatattcaaatagatttctttgattcgctggagaataagaattggacatttgctccaggccaattgttcatcttatcgataaatacaaaatgatgtcactcaagttgtgggataaccccccaacccaccctcaaagtttaagaaaacagctacgtagatagcattatggaattcttaaagctccgaggggtatgagaagacatcagttcaatatcttgaatttgcaaaagagctcactgaggcccagtaatcttagctcaagtgactttcccaaggctccagaggcagctggtggcagagccaatcccggcagccatggtcggtcttttcttgtgtttccctccaggtcttctgcgtgcattaaactcttacagaggtactgacttggttccagacatgtacctgtacatgggaagtccctgtacttgggtagctcatggtattcatatttgtcttagatctttcttccttggatattacaaagtggaagcttatgaagtgtgaaaattaaccaaaggatcttagaatccttcagattattttgagtcattcactatacttaataattgcattcattgtattttactaaaactatgtgtatgaagcatgaaaatacatttgttcttgaaagaagggaacactcaaagtatatggtacatttggctctttcttatcttgcttctctgctacctaggccaacactgattcttggcgatggggtctctgagaggaaacatccttagctacacgatcctgtgggtatgacaacagtggagtcagttggggctgtgattcaaaccccgccacagccatactttgaagcctgggtctgaaactgggccctcattgaagtatcttcaatgtgtagggcctgataggtacccccatgtggcccccagggcccccaccatggcctgataggtgccccattacctcaggacagctcatgctttgggacgaatcagtcccacttggtaaatctcaaggctcatactcaagggcatcaaaggccagtgtgtaaattggggctattctcgtcttgagaaggcatccacctgtcactgtgtcacaggctgctgacacctctcagcctacattctcagtgactgtagcaatgattcccaggtgaacagagctgctcccccaggcccccttgcttctggccccagaagtccaggacacctctcctaggtgcacggcttcccaagctcctctgggggtcttgggttgggatatacttgcttgggggagaaaatgggagactatctagaaggaaggtctgatttggagggatgtagcgctggcatggtagttgctatgtccgcctttcgactggttgctatggggttgagccccagttcgggcaaatgtatgttcccggagaaaagcattttcagtcggcaattcctgacccaccctttgaaatgacttgattcagatactgtttatgaagcactttccgttctgaaatggggcctaagttcagggtagtgttcttttctgctgtttcatttgactgtaacgggagttacacaagtaacacagggtataatttgacctaattgattccaggcctcttcattgtcgctctaacatcttcctccctttattaaattcacatcagttcacatttcccttcgttaaacttccagttaaactcttgcagagatgagaatgctttctgcagataacttcagtaatggaagcacctaattttctgtttgggtgataaaaagcctctggtgatgaaaatatttactttaaaaaactgggattcttaactaagtgaaaaatatatatatgaaaattactgttctgcaaatagttagaacagggtagcgcctctgctcatagctttgtatcaacataggcaggtgttcaaatggagagagcagggtggggggcccaaagcgaggagactgagtttccaaattcaacatttagctgttttgggttagggttgagttagatcaaggcttgtacattttatatactttgacagaattgtgttattggattgagaaaaatggaaggactttagggagagggagtaatcagtgaatccatctgcgtgttctcagaactcagtgaattaattccatataataactattttaaattttcagtcttagaaaaaggttcctttggtttgcttgaagaatactatccattccagttcttaggaacattggcctagacacatttgaaattcagtagactttgggcaactgaaatttacaagattaaactattacaaactagaagaaaataaaggtgatggttttaactggtctctcaatggagaaaagctttctggctataagtaataggagactgtataatgtacatgtacacatgtagatacatttcttacacatacagtatatgtaaagaaatacccagatattagatgacataaaattttcagacacatgtcaaaatataaacaaaattaaacatatacacattaaccctctggtatatttgttgcaaatatgatagacaataaatatggcaaagacctattcttatataaaaagcccatataaatcaagaagaaaaatatcaaagttgaatgtaaaatatgtagaacacatgaaaaagaaactgagaaagaactataagtgcctgtggtgtattttcaacagctctgtgaatttcattattatgtttctgaaagtgccgtggtgacctcacccacatgattgacatggtgtcccatttgtgaggacacacaccaggatctcccccaggtctgggcttttcctgggctacctttctctgagttctgtaactggccacgtatctgtgttttcagtgatttctacaaaggtgaggaaaaaaaaaacatgctgggtcaggtgtgatggcttctgcctgtaattccagcactggaggctgaggcaggtattcaagatcagcctgagcaacatggcaaagccctgtctctacaaaaaaaaaaaaaaaaaaaaaaatatatatatatatatatatatatatatatatatatatataaaattagtgggcatggtagtagataagggatcttcatgacacataatttgtatatctctgattgtgttttctctctttagtttctcatttatttttatgatgatatattatttgatttttataaaacacctccaatactttgtggaatgacatgggttttaagtaaatcattacataaaaatatatttgaggccagatatgatggcgtatacctgtaatcccagcacttttggaggccaaggcaagaggttgcttaaccctaggaatctgagaccagcctgggcaacatagtgagatccctgtctctacaaaaaaaaaaaaaaaaaaaaaaactatttaaaaaactagctgagcatggtggcatgtgcctgtagtctcagctactagggaggctgaggtgggagaatcatttgagcccaggagttcaagggtccagtgagctgtgatcacaccactgcgctccagccagggtgacagagtgtgaccctgtctcaaaaaaaaaaaaaaaaaaaaaaaaaaacccaccaaacccagtatagaaaatatatatttgaaaatttctatagatactccatagcatctccttgcaatttattaatttatctttataattcccttgattttgaatacctgagttggaaacagtcactgtataagtagccacctaaagagtgaccccctcacccctactgccccatcagtcactcccttttctgatttcctctacggagggaaagcccagctgttcttagatgttgcgaccactggtggccagcttggggacatccaggtagtccaatccttcctttcaggttgttggaagaattcagttttgcagtcataggaccgaggtgccccttttcttgctgactgtcagccagggctgctctcagatcctagaagctgcctgtatttctcaccaagtggccctttccatcttcatagccaataacagctcattatgcctgggatccctctgcctctctcttctgttaccagctagagaaaactatgtgcttttaaagagctgctgagattcaattaggcccacatgggcaatctcccttctgattgtactcaaagtcaactgattagtaaccttaattatatctgcagaatccctattgccacgtaacttaatcaggacatgacatctcatcatgtttatactcctgggaattagggcaagaaatcttaggagtccattttagaaatttgcttaaaacagccagatgtcaaaaactcttagcttctcttcattcataaggttgtatttcttccactccccgatttctgtcttcctgttgtttgcagacttttgctgttctttagtttgagtgttttttttcttctttcacatacagtgtacaatatccttttaaatcttatcctttgttacagtctctgaattcttcactaataactgtaggaagtatctctctctacctttctcttcctctcattctcactcttcaagccattggcaggagacatgtaatgatgtgagggtcaggaggccaatacaccagttcctgttctgtccctacattaagtatgtagcttgatcttagtgtcttggtctcctcaatcagtaataactaataattatctctatttaaatgaaaacacatggacacaaggaggggaacatcacataccggggcctgtcggggtgaggcaggggagggggagagcattaggacaaatacctaatgcatgcagggcttaaaacctaggtgacaggttggtaggtgcagcaaaccaccgtggcacatgtatacctatgtaacaaaagtgcacattctgcacatgtatcccagaacttaaagtaaaataataataattttctctgtttagaggataaaatgagcctatttaaatgtctttcaaaatattcaaattgtgtgatgctaagttcctaaatcacctcttgtaagattattcttccttttctgggatcccttctctcatgatatgcccaagaattcctgggacttaaagggtcagccttggtttctcttaccaagctattagagtcattactcaaaatacctcctagaagctgaggactccagacctctaccgagtgctgtggcacctaaacactgatgaacttggagatatttttggatgtgccgcaactgcctctatgtgtgcagaatagcagggtgactaagagcaagaacttctgaataaaaaatatctgggcttgaatcctggctctgccactgataagctttaagaattggagcaagtttcacatcagtaaattaggataataattgggattgagagaaataaatcagatgtttataaaaagcttatcactgtgcttggcacataataaatgtttaataaatagtacctactgttacttttgctaagttacttttgctaagaattaacatggcagtggcaaaaccttagtcttggttgaaattacagtattatgaaaacattttggaggttaaaatgatcatagaaggatcacacagttgaattacaaattcaaaaagttttaaatactaaaatttaaaaatacaaaataccaaattttaaaaaatagagaacacacactgtaattagacccctaagaagggaagaaaatggcttaattcattcccgttataattaacagtgggcgtttaacagtaaagatgtgcttcgtgttaacattttcctttgtctccagttgctggacttcctaatacaacccatttatccaaaaatagagcaagaggaaacagaacatagtagcattgtagaaataaatagtcgttctggctggaaaccaaatggttggcaggggcattttactaatcactggtgtattgatatggcctaagctgtgcttgttggcaaaattgttacagtctgacttggtgactctttaggatggggttgtaattttattttagaatatttcacacagtaaaggactaaggaagtccggtctcctaggttgcaaagccatcagttagtaggttagaaaattgctggagaggcttgtgtgtgtacttacaccattgttcagcattaattgagtatgtattctgacaaatggattaagaagggagcaggaaatagtggaaacagagaaatacatagaagtagtggaagagaatggagtttacatttgtgtaacttgtgggctcttcgtttaatcccctccgtaatccacagaacagatatcctccctgttttaaaggtaagcagcttgggggtcaaaaaaactcttcaaggtcatgctcattgataagtggtagagctggaatttaaacccaggtctgtgtgaccacaaatgccatgtattttccactgatttgactttagatttgaagcagaagtaaaattgggaaagtatcagtacattcagccatggcatcaccagtaggggagatgaagttaaagcaaaatttgagagaatcccttctggtggaagggctctcagttaaagccccatccataattgctttctgttcatgttgacctttattttagactaatggtttgtttattaattaaactgtgaaaactagttttacttgattaaagtgcacagcagagtatactttgttttggtagtgattgttttttcttctattttttaaccctttaatgtcagttttcccttggagggataatatattagattaaaaaaaaacactatgacattaggggaaaatagtatagaatgctacgtaggcagaagttattactctactgtttttcatatggcttattagctggtcgttcttttttattgtggcaatatttcagttactaagatcagatccttcagttaaccagggttgtctgttgttctgaactctacttggaaaagaaagagatcaataaactcagaaacaaaggcaaacaaagatacacgtcctcaccttctcatcaccagtccactcgagagaaaccagctttcaaaacattcagtctattttttcaataccttgctttttaactttacaatttgtaacatgcttttaagtgtgttaatgagctcctttgattatcatgtttttttaatgtgagaaaaaataggcatatgctgttcttcccaggtcttctggtgttcaaagttctatcaactaaacaacactggacttcttatcttttcagtggatgcttatgtggaggtggtgcaggatgctcaattattaaaaaatgatgtgattatatattaaggtcaaaaactgcctgatgcacatatacaccatggaatactatgcaaccataaaaaaggatgagttcatgtcctttgtagggacatggatgaggctagaaaccatcattctgagaaactatcacaaggacagaaaaccaaacaccgcatgttctcactcataggtgggaattgaacaatgagaacacttggacacagggcggggaacatcacacacgggggcctgtcgtggcgtggggggtggggggagggatagcattaggagatatacctaatgtaaatgatgagttaatgggtgcagcacaccaacatggcacatgtatacatatgtaacaaacctgcacattgtgcacatgtaccctagaacttaaagtataattaaaaaaaaaaactgcctgatgttttaaagctgaattgaaagtgtatttttaaatttagatttggccttttgctaaccaagatattagattatctagaacatctccagtaatgatagaaatgtagtgttgcgaagggctttgggaatcatcttgtacaaatgcctcacattgcaaagtgagaaaactgaggtttgtggatggcaagccatcagtcagcttgtctgggatgtcatgttgtgggcccaacaggtgggtaaatttagatcaggtcacacattttttaaaaacacatttataattggactggatacttgaaaacttttaaaaagcataaaatagaccaaatccatggcttagactgttttgttctgctgatttttctcagaatttacaaaatacagaggattgcagcagatcaaaaataagcaaatacatacgaattagagccggagaagctttccagatttcctgatcttactgccctacaagtatgaaaaagcgtttctaaacatgtctttttttaatgtcaagatgagcgtggcaacctcgtgtttgttttatacttttggacattttatattccactctgctaaaggggacttggggtgaaaaaacagaaaagattttggaatctttaatactccctgtagaatcatgttatttaacttacggccacaacttgtggaatatttcagcacttgtaattctgatttgaaaagtgtttttgttttttccttccaacttgctagcagctgtaggcagtaactgacatctttatataagttgcacattgtcgacatagataactggacaagttctttagagtggcctggcacttttagaggtttcttttcctgctagacggtgtttaatcatgaaacagcccctagagggaagtgcttctagctgtctccatcacaaacaaagccagcacattggctcaaaccaaggggcctcctccagagcctgaggtcctggagccttgccccgtagcccttgctttcaaatgaacaggggatgtgtagccacctacaatctgacgtcaactgtcaggtcacacgcctcatgcctaggtcagaggtacatcacttttagacacgttgatactatcaagagaaaggaaaagaccatcaggatctggggaagggagatctttttgagccaatgattgcattttataaacacgtgaaattggcaagacattctttccagatttcacagagggatatcccatgtccaaccagggtaagacatgaggacatgagtaattagaaggagaaacattgttcataatgacaaggtggaatgtgaaaattggctggagcagaaagggggaaaaagacaagctgcaatgtgagatttaggcacacagacaggcgtgtggtgtctttgtgtgtgagtacatatgtgagtgtgtgactgttcacgcgtgcacatgtgacctctagcctaccagatcatgtgaggctttattgaagagatgttctgtgacagtagggtgaccaatttgtcctagtcttaccagtctgtcccagttttagcagctggagaggatgatcggttgaaattcaaacctgagtatactgggtataattgcatatatacttcattgtctccacaatgagtttgtgtaacttgtaggttacacaaattgctggctgaagttcatccaggtcaatttatgtgctaatgttttagggattgcatggctgataacagtatttttttttactatcagatccagaaaacaattgaatttgaatttggcaaacggagataaacagggagaaggagaagtaaaaaagggatgtaaggggagagaaaggaagaaagggaaggggaaaaggcctctaagcctcactgggaaggtcctggtaatgtcactgaaccaacatgagcccaaccacaggaaccaagaatctgctctggaaatcctgcttagttgtatttaagtttttttccctccagttaccattttcttccaaaactcggcatgtaagtgaagatggtctttaaatcccagatgttgtttttccatcttccagctggagttgaggtaatattgtgatattcaaacagaaacagaagctgcattttttgggttattttttctagcagcattaccataaattggactgcagtgagtaatcttttaatcagatggaaagaggcattccaaatatgtttctagtcatctgagagtatttaacaacttctttaagaaataaagttaagcgttggtgaaagtggggatattggtggtctgtttaagtgaaatacttttaaactttttgttttaaataatgtaggtgtgttttattacaaatagaatgtacttagtatgaagaatttataaaatagagataaccaaaaataagacaatagaaattattcatactccatcatccagctaactacaattttgtttcagccttttaaaaagtatgtgtatataccttttaaaatgtgtgtgcatatacaaatgacatcaccccatacatgtgattttgtaagtagatttttaaaggtttgctctcttttgttttgagattgctttgggtattgcagcattcctaatacaggactaagactttcacctcaagatgatagatccccacccaggtgcattggtggtggtttgggaagctgtgaccaaaactccacaaacctcgcaaatcgaaagctctgagaaaagtgtttttctggctctcgggacttgctgatgactgcgcattggctctttttgcttcacgtgaccccttctgtccccaccaaagggagttctgcctggggacctttctagcgctccagttgccttatggcctgggagccctcagcatctttctgtctgcctgcctggaggaaattaggtggggacagtgaactagagcctggcccagctgctcattccccgaggcaggtgagcatgccctgggtggaagcctgcagcacatttttctaggagctgagttgctcgttcttcatctttcccttatcccctagcacgtgtgtcttaggcagcagtcccaacctttttgacaccagggaccagttttgtagaagatcatttttccatggaccaggtggggaggggggtggtttgggatgaaactgttctacctcagatcaccaggcattagatcctcagaaggagcacgcgatctagatcgcttgtgtgcccggttcacaatagggtttgtgctcctatgagaagctagtgccaaggctaatctgacaggaggtggagctcaggcggaaatgctcatcgccagccatgcaccttctgctgtgcggcccaatccctaacagggcacaggccagtgcctcgggtctgcagccctggggttggggacccctcttctatgggacatcattctgcctgttgtgggctgtttctccagtggtccctttcttccagggcaacttcagccttcttgagctgaatatgacaccagccttttaaaagctttccaccttgttctatccaggtctggcagtttgacccaagaactgtggggattggggccctaaaggactctcctgtccccacccaggggtggcttcacctaggctgagtggcagaactgatgtttgcttctgggttcttgcattgtgcccatgactgctgagccttgggccaactcttttgtcatctctgctctcagaattactcaactgagctggtcatggttgctcacacctgtaatccccgcactttgggaggctgaggcaggaggatcacttgaggccgggagggcagcatcgtgaaaccccatctctacaaaaaaacttaaaaaataataaaagaaaaattaaggaatgactcctgtagttatcagtaggcatcatagtgtaatgatgactgtgtgggtttgggatcatgtcccagttctgccctcatcaatcacatgaccttgagtaagttactttcttctttgagagtcagttttctcccaaactgcagtgggtatagtaatggtgactaccatgtgtggtgattataaagatgcagtaagatcgtgcacgtatgccactttgcaaaccatttggcttactgtcaggagtcaatatattcattcttaagcaagacattctccactgtctaagactattcaacacaaggcacactgaaaaggtctatacagagggactttggctgttcggaatgtgaaggggaaagttgcagggaatgagatttaacctaaaatagggcttacggttatgaattttaactatccacattccctctacccagtgaaaccatcaactgactgcacgttgccatggactgcaggagggacttttttttttttgagacagagttttggtcttgttgcccaggctagagtgcaatgacacgatctcggctgactgcaacctccgcctcccaggttcaagcaattctcctgcctcagcctcccgagtagctggggttacagtcatgcgccagcatgcccagctaattttgtatttttagtagagatggagtttcaccatgtcggtcaggctggtctcgaactcctgacctcatgtgatctgcccgccttggcctcccaaagtgttgggattacaggcgtgagccaccgcacctgggaaggacttttaagcagccctagcatttgaaatgggacgtggtctgcagagacggggtgcatttcttttctctgtcatctttgtgcagttgcctttgttcactggatcaggtccctgaaaatcttctttcccctcttccctcctcatgcctgcagcccagttccggaaccaccttgtctggcactgattgcagccagcagtggtgccacctcactgctctatttctgtgggttttatttctatcctgggagcgtgtgtacaaataccttcttcccctccctcaagcccaccctggctctgaggtctccatcctcttcttatggtgctatcgaaacccagatgctctcctttttctcactaccttttagattctccatcctaattgttgggaacagcagtacaaaatgagggaaaatgatacaagtgaccaaaagggtgatgagactttcaaaaacctgagttccagaaggcaccagcgtcagcaattcagagtgttttggatcttaagccatagcaactagtggaaaccttgtggaaacctcagcaggaccccccatgctacagtaggattggtgctggttgtgtgtgtgtgtgtgtgtgtgtgtgtgtgtgtgtgtgtgtgtgtacacactggtaaatagggctcttttatttctagcactggtctattccgaagtttccgaatatagaattacatattacagcagggctgcttagcattcttgtaacattctgaaccccaagattttctgtgttatattctcccagatccctcactttctttttccatggaaaatgttctgagttgggggattgcagttaccaccacgacacgtcccaaacatttcctgagcatctcctgcagatgatgatgaggctgaccgaattgtggactctgctttgttccaaggcagtggacaaacaaattacaccttccacttacagaatattgtactgatacttcttgaaatgcttgcacgtatattacttcattttagcattggacagctctttgagacagatgagtcgttattacctccctttagccaatgaagacaataaatttgagaaggttactcaaagaattattgactatcagctatgtgacatatgggatattaaaaggcaccacacgaacttcttgcactcatgaaacgtgcattctagtggaagaggtaacaataaattaataaattcaatgtaatgccagatagtgaccaatgctatggagacatgtattttaaaaagcaggcattttaagaagatggaatatgaccagacacgctgtgttaggtgggcaggtctacctaacacagaaggtctctctgaggagatgatatgtgagcagagatgtgacaaggggagagagaaagctgtgtggctgtctggggtaagagcatctgcactgaggaaatagcatgtgcaaaggtcctgtggcaggagactggctggggccttcagcgtttccctgctgagaagctgcatcagtagaatgaagctaggtcagagagcaagccagggccctacgtgggttaggctttgtgcaccaccctaatgattgtgaaaaataccctgaaaaggtttttgctctgaggaggaggacttttgagggttacctactgggaatgatatcatctggtttatattttaaaaggatccttctggccactgtgtagagaataggctggaggggcaaagtagaacgaaaaaggcatgttaggtggctgttgcagtggtttagataacagatggtgatggtttagtccacagtgttagtggtggaggtggtgagcagattgggtactgatagattttgaagacagggcaggcagggtttgctggtgtcatggaggcaggtgtccaagaaaggcaggagtcagggggaccctgagctcagaagaattcaagaagtcatagtcatgttgtggttggctgaagatagatctagactttctgactggcccagatctcccggcgatctttccagggccactttgagaaaaggcagtgagtagcaggggtctccgtccggcttggcacgttctccttgaggccattgtgagtcctctaagaagggactctgtctctgtcaacccacctttgaccacagacctttactgatcctttctgattgataaacaatagagggaggaggttgtgtgatcttttagtttatctcaaggatatcaaaggggaggggaagccctaactgaatatctagctaaataggagataccattcagtctatttgtagtgtattttaaagcctgtttcatgtgcaaatgtgaactacacagaggtaatctgataatcccaaaagggtaatctgataattccaaaagggtaatctgataatcccaaaagcttattaacataccttgtagataatagatatccagttagtatttgttgcatttggtgatttgtggttgaatattgagtgttggtattttctagaaccttacattcaattctcttccctatatttgtggttagagtcacacttcactttcagatggaatgagtgtcagtgtttccagtattttccagatgaggaaactgagatgggaaaaagggaaaaggtaggcgtttaacaaaggcatttcataccactggcttattgtcgatgaaacaggcagaagaatcttcctgctgtatcccagacattcactatcgggattcacaccctgttgtatcattgaaaaacgcgcagacttcagctggatgaggtgctcatgcctgcaatcccagcactttgagaggccgaggccagagggttgcttgaggccaggagttcgagaccagtctcggcaacattgtgagaccccatttctacaaaaaatattttgaaaactagctgggtatggtggcacacacctctagttccaggagttcaagcttacgtgagctgtaatcacatcactgtgctccagtctgctcaacagagcaagaccctatctctaaaagaaaagaaaaagagaaaggaaagaaacaatgaatgaaaatgtgtagactttaattcacactgaccttctaagtttttcttaggcctttattgacattgttatgtcacaacaaaatctggccatctctgagaacttataaaactttagtggttttaggccaggcgtggtggatcacacctgtcatcccagcactttgggaggctgaggcgggcggatcacctgaggtcaggaattcgagaccagcctgaccaatatggtgaaaccccatctctactaaaaatacaaaattagccaggcatggtggcgcatgcctgtaatcactgctactcgggaggctgaggcaggagagccacttgaacccgggaggcagagattgcagtgagtcgagattgtgtcattgcgctccagcctgggcaacaagagtgaaagtccatctcgaaaaaaaaaaaacaaaaaccaaaaaaaaaactttagtgtttttcagagacatagtgtttccccaagttgtcatttgaagtacacaccccttcttccaaccacatgggcgtcagcaactccactgtgatcaaaaggcagcctgtctgacagaatattccccagtcttcttccctatcggcattttgaggcagggacacactacagcaaaatcagtccagacccttatataaaataactcttccgtccaccacagtggccaatatttccttttcctaccttggccctgcctgatcacacacaccagctctgcagccagaggacccctcatgggtgaagtgggctccgggtaccctgtgagttgagaccacggtcccccaggagcatgcagtggtgcctgagggtggttggcagtggtgatggctgtgttatgtgtccttctctctctgtctgcgagtctggttgggtggactttgtccttggttcaaaaagctctcagggatcagctccctgttctcttactcacaggtcgcttctagtcaagtttcttctgctgtaggattcacgttcactttctcctgttctgactgtcctctgtggcatacacctttgatgtattgatctcccaggtggcttcctaatcctcagggtgctgcagaggtcagaggggcagtgtgaccacacacctggaggggcctggggaagtgccttttgtcagcccaggtttgaatgacctgcaggctaattatgttacttacgacttatgttgcactgggctccttaatgccaacctctgggcgtttgaaggttataaaaagagaaaaatcaaaactcagaccatcagttgcgctgattactaattgctttggtgggagattttgtgggaaagacactaatagtcaaaggtggtttgaacaatcacctgtgacttaacctcattccgacttttcttttgactacttattgccagcaccagacaggaagagcaaaaggcagagcaaagcgtctgctgcaggtgaatcaagatgtagcatgatcttgtcccaaatatgcatagccacacagtcacctctcatgggagcacagtcctgtgtgtttgcctatccacgctgcatggctgattcctttcttgatatatgcttcctgtcttttgtagggggaggtgctctttggcatctccagacagacccctctccactcctctcctatctcttgtcttcttttgcactatgagccatgatgttttagaatttccatgcctcgttgaggctggaatttggtacagatccaccacaacccagcatcaacctggaaaccaatgcagctctccttggaggcttgctgcccgtatctacagctttcttcactttttccccaacctgcggaaaggcctttttgttgatctcatcaatctgtgatttgagatcttgaaagaaccaagatcttgtgacttggcagggggagccacccgccatgtagccccaccctgtgccctccctgaccccgtcgccccctgtgcggacctgctgcgcttcaggggaaaacagcacgttaagtgagcagtttagcttggactgaatccggaggcaaatcaagtaactttatactgagatactctctccattgtgttctcaggaagatgaagtgaatcaccagagcaaagaatgtgctctctggtgctacaccaataataaagtacaatgttttgaattagaggagggagagagagtaactgagaaacctttggctggtcactttattgttccttgtggctcccccttcccttccctcagatatatacttggataagaatttccttctccagcccagtatttcctaaactcaatcctgcagtaaaatgacaaggccgtgttagacatggaaattattgcagagcaacaaatccaagattgttatttcaccaaaggccccaggaagtggagatgaagaactgtgagagcataagcctccagctcaacccaaatgtgtttttcttgccccacttgttaattagtaaatcaaaaccaaatgaaaaatgcaaataagtgcatgccacaaatctgtcatacttgaatgtttcccactttatttctgtctttctgactttatcctgtccatcattctcgtcatctgtgagtaaaagcacccaaaagcaccttggtagattggcgtcaatttgggtcttatacataaaactgcctgacaaatgacagcgttcaggtagggattatttagttaacacagaagttatgtgatttatattttttaagaacagaaagatgggagtgataaggcactatttttcccactcttttttaagtttcttacaggtgttttctgtttttgttttgttttgtttctaaatcatacattcaaatgcttgagcctggtgaattttttgttagcttgcttgtttttggtcatttaggaagcattgcctattcagatagacatttacaatcaaatagggctgaacacaccagcacagctgttgctcagaagggaccaggagggctggttgccccagaaaaggaaagatattctccaagaacagtcctgggagaagcattttgttgtgtttttgcaaggacgtggggatccaagttttgtctattaaaggaaaggaatggccctgttctgtttgtgtgttcagagcgcacggctgtgctcagagatgttcgtgcaccctgcggtggtatttttccattctcttgtttagaacccctgggcatttagacacatgtcctgcacacagctcagcatctgtgatcacatggtggtttagaactgaggtcttggttctaaaccaaggaaagattcaagtgtctgtcccttgctgcttccaggccaggccagccagctcttgagaagtgtggctccttcaggtccggatgggtggctccctcattcaacagacatatactggacacctgctatgtgcaggtactgtttcgagcacttggactgcatgacgcaacaaaacaaaactccttgccttcccttgtggggcatacattggaggggagtttagccctcagcaggagcatgcctgttttctttctcactggctaccgtttcggtgttgttgaggtgaagagggacagccatgtgcagatgcccccgattagggacatgttctgaccacggctgcccagggctcaggccagcctgggcccatcacgcggaccagaggttggacggaaccatgagaaaagactctccccgtgtcccagggcttggcacagtggtgctgtgccgcgaataataggtcatctgatgcggtataatttaataggaatatgaatccccagtaacccggggaaccaaagcaaggaattggcctctcagttacttttaactttcaaaacttgaacatttccttaaaccaaatagccccatcgtcatggtcagaagtccactgtggagaaaggcaggatttagtgtttatttaagctgccaccccatgagagaaactgttgcccagtggagtttgactctcaatttttcaaggaatgattttccattttgtggattttttatgtatgtcttctctctctctctgtctttccttccttccttccctacctccctccagaaatgttgatgggagcaggaaaatttattggccaggtaagggtgtatatgaagaaaaaccttgatggtagggatcctgataagtaaggctcttaaaaagactgcagttagccaggcacagtggctcacacctgtaaccccagcactttgggaggctgagtcaggagggttgcttgaggctgggagttcaagaccagcctaggcaatgtagtgggaccccatctttacaaaaaaataaaaaacattagctatgcatggcagtgtttgcctgtagtcctagctactcaggaggccaaggcaggaggattgcttgggcccaggaggtcgaggctgcagtgatctgtgattgcaccactgcactccagcctcggcaacagagggagacactgtctcaaataaaaatgcaccatctggtgccatgtagcactgttgggcgtctgcagagcattttggtcacagggtcttctttgcctcccgcctcttcatatgtagatgttactacgccacaagcagagggaggttggtcaccaaatccggaaacatgggcaaacccacaataaatgggttattgatactacattccagtatacagtaagatactcttgtctttgtttccagattttatggccactctgtagaagcttcaagggactgaaaataagtcatttgatgcagctaaaaagagacattgctgccttttgatctcacatcttcagcctgacggtcctgtgttctcttcatatcagactcctgactttcagaaaagagccaatcaccatttgactagggctcatcacttttcaactttttcaggatttcttttggcaagagcaccccccctctctctcatgtgagctcactctctcctctctctcatatccgtgctcctcttcctacagtgctgacctctgaggtatccttttttcttttgactctcatcagtctacaacctctgtctatttctccttctcttagtctctctgtgactcccctggattaaaccttgtttctgctcagactcagcaaatattcattgtgagcctactatgtgccaggtgctgtgctgggcttatcactcagtattcactgatttccccagcctctttctgctcagaggtcctacatagccttggggtgagggtgtttagctaatccccttgtgtttggggtgggccgtaaatgagctctgatggaccatcctcagcccctccagaatgacctctgaggaatcaatggctgagaaggagagatggagagtgtattagtccattttcaaattgctgtgaagaaatacccaaggctggataatttacaaagaaaaagaggtttaatggactcacagttccacatgactggggaggtctcacaatcatgatggaagacagaggtacaccttatatggcggcaatcaagaaagagcatgtgcaggggaaatgccctttatgaaatcatcagatctcatgagacttattcactatcacaagaacagcacgggaaaacccacccccacgattcaactgtctcccaccaggtacctcccacaacacatggggattatgggagctacagttcaagatgagatttgggtggggacacagccaaaccttatcaaagaggaagagcaaaagagaatggaagaggtatatgccccaaagaactgaaaacacgtactcacatacaagtacatgcatgttcatagaagcactattcacaatagccaaaaggtggaaagagtccaaatgtccatcgatggatgaatggataaacaaaatgtggcatgtatccatacaatggaatgtcattcagccataaataaggatggagtgcagacacacgctacaacatggatgcaccttgaaaacatgatgctaaatgaagccagtcacaaaggatcacatgttgtgtgattgttttcatgtgaaatatccaaaataggcagatccagagaggcagaacacagaatgatggttgttaccaaggccgcgggggaggaggaaatggggagcttttgcttcatgggctttgtgtagaggcgatgaaaatgttttggaatcatttagaggtagtggatgcacaacattatgcatgtactaaaacgccactgaattgtccacttcaaaatggtgaattttatgttatgtaaattttacctcaattgaaaagaatgaaagataaaggaaggaatgtgttaggggtctattgctttgaattaaggatgcaatttagaaatctggcctgactttcctatgcatggtgaccttgtgatgtggcttgagtataattgaagtaatttgagtagattaatttccttccttggcttcttaaaatttaacgtgcttgaagtttgcatcctgaatttagaatgcaaagcagtatgtggatgagtattctgggccaatagtgctgctgcttaaaacaacaaacccagacagatgtgttcagcaggttctccagcttagctgtttgcatcttggagaactgttcctgggtcctggggaaagaccactgggggtggggtcagaagcctgagttctgttctgcctccttatgcccatggaggatactgcagagctcaggaaagagcacgaagcaggacccagccctggctcacacgtgcattcaacacacattcttgggcaccatgtactaagccttctatgggatatatgaaggtgaacatgacatggaccctgcctttgagaggcttgcagcccagcaggttaaggtagacacgcaaacagctgatcgttttggtataaggtaggggtttgatgctgaagatcttcatgggaccttatagaggtctagagttgagggtactaaaactacctgggggtgaggtttggtggaagaaggcaactaaggaaagcttcctggattcaatcttaaaggaagatttaaaatattgctgaattactgcaatagaccgaatgtttgtttccacgcccctgcaaattcatatcttgaaacctaacccccaaggtgatggtattaggaggtggggcctttgggaggtgattaagccctcatgaatgagattagtgcccttattaaagagaccccagagagctgcctcactgcttccaccatgtgagggcacagcgagaagacagccatctatgaaccagggaagaggccctcatcagcaccttggtcttagacttccagcccctagaactgtgagaaatacatttgtgttgtttgtgagccacctagtctatattttgttacagcagcccaaatggactaagacaattacccattgcgtattgcaagtaggtggttagaggagcagcaaaacaggaactgttaaaactgagtgaaaacatgcttacgaagagtttgtttgttattttgcaccaaagcattaataattagatataagaacactgatgtacctacccttgttttatggctttaattatctaggatgacgtaggggcaccaagccttttcaaaatttgggttctgtaacagtctcaatccaggaagtaagagaaggaaagctcacttccagggcaagtatattgtatgaggaaggcgaagtcacgagatcctgggcagtgtggtgggacaaatagagcaatttaagaccttcaaaggtagagtttaaggtggaaaagggtgagggacgagggtgggaggtggctgtggggtacaggctgaagggctcttggcaggcctgttacaagtcagacttgtggccctggtactagctgcagtgtggagagagtggatggacatggggcaaaatgcgaggcagtgggactgaggctctgcatgagggcagtggtagtgaagggagtgggacccactgggtttgagacacttctagaatgatgctgtccagtagaactctctgagatgatggaagcatccaacggtgtgctctccaatacaggagccaccagacacttgtgactcttgaacactttcaacgtgactgatgtgacaggaaccaaattttacattttaatttatttaaatttaaatagctccccgtgcctgtagcttctatattggacagtatagttctagaaagtaaaagcaacaagagttgatgattaattgggcaatttagggtggcagggtagacagagctagagacagaggggcaggttaattgtagaggggggaaagatgagtaccactgtgtgcatgttggctccaagtgcgagagacatctgggggaagaagtatgcccagcagtaagaaacgcaagcctctttggagaacgctgggctggagatagaaatttgagagctttcactgttaactatgataggtgagatcataaaactgagtagcacagggaagccacttcactgcttttggcctcagattcctgttgatttgatggtggtcataatatttgctctgcctaccttctgggactgttctgaaaaattcagatgggattacgtgcatgaaaatgctttgtaaactcttcagacattaggcagagtttataacgtctttaggagtgagaggaatgtgtcccacatgttattttccaaacatgaaagataaagacttcaaattctggaagtattgcagagtagatcatctgcagggcctcctgctaaaaaacgacaagatccaggataaacaaaagcaaacttgcctaaagtatgagtgtcacgggctcagggacagctttcaggactcccctgtgggagtttccatgagcaaacaaacataaaagttgggtttctgtgaatgcaaagaccaacactagcgctgatcctgagaccagcttggggtctgggacagggtagtggggagctgtccctgaggttcccacattaagccgggactgtcaaagggagagaaagtggttctggctggtggtgttcctcacaagaacaaatgcttttttttttttttttttttaggaaaaaaaagtaacccaatttaaatattcaggatgaatttcaattaaaaactaccaaaaaatcaaaaatcttcaaacacacaaggaaatacaccaccaaaatgtgtatcatcagagtgaatcatcagagtgacgggagagtaatttcagtcccccaagaatttcacatattggagaacaggcaccaagttagaaaatgcaagacaataatatagaaatacagaaagaatgatagtataataaataatagtaaatatatgacaatttaccattgaaaatgacagcacaaaccaaacaaaaagggagcaatttgaattttttttttttaaaatcattgaggtggaaaaactagggtgtggtgacatgcacctggtgacatgtagtcctagctacttgggaggctgaggtaggatcacttgagcccaggagttcgagaccagcctgggcaaaatagcgaggtgccaacccaaaaaaaataagaacaaataaacaaaactcactaatagattatttaaactgcacattaaacagtgaaggagagaactggtaaatgtgtaaatagaagatattacctaaatctagtccagagatcgggagataaatggtgtaaaatcagtagctaagagatgtggacattagaaagtctaatatatacctaattgtcatttttgaaggaaactctaaaacaaatggcagagaggccataattgatgagtgactggctgagaattttccaggactgatgggagctaggaacccacagacagatgaactacgacggcatctgagccgggcagaatgaataaaaagaaacacacaagtaggcacaaaacactgtagcaaatgcagtgtaccagaagacaatggcattgtcaatgggaccacagaacccagatcacccgggaaggaatgctttgtttgtttgtttgtttttgagacggagtcttgctctgtcacccaggctggagtgcagtggcaccatctcggctcactgccagctccgcctcccgggttcacgccattctcctgcctcagcctcccgagtagctgggactacagacacccgccaccaggcccggctaattttttgtatttttagtagagatggggttagccaggatggtctcgatctcctgaccttgtgatccgcccaaagtgctgagattagaggcgtgagccaccgtgcccggccaggaatgctgagtctgaaggaatgaatacaggctgagagttgttcttagtcaagtggaggatattgtgcctgttgttcctctgcagtggaaatcaggtgtgggaggatcttttgttctctctttaagctggcctatctgtgttttgactggagatgtagcagtttttctcaagtgtgaaaaaaggcatgttgtgtagattgatttttactaaatgtggtctgattgcttctttaaggcagcccttgtaagggggcaaaaatgcggttatttgacattaatggaactctatcaaggctgtgatcattcatttgaaatctttcttcccaacgcatgtttattgactgaagtgcctgagtgtgctctcatagaagccaaggtccactactaatttccataatgagacatgtatagtggtagctactgagcatctccccaatttttttttttctttttttgagatggagtcttgctctgtcacccaggctggagtgcagtggcgtgatctcggctccctgcaacctctgcctcccgggttcaagctattctcctgcctcagcctcgcgagtagccgggactacaggcatgtgccaccaagcccttctgactaacttttgtatttttaatagaggcaaggtttccccgtgttggccaggccggtctcaaactcctgacctcaggtgatctgcccacggcctcccaaagtgctggaattacccgtgtgagccactgcgcccggcctatctccccagtttaaagtgaaattaatacctatatttgggtatgaaaatggttttaacatgattttttttttaaaaaaaaatgactattaaccctttgtgctaataatatgtaggtgcctagtgtcctaaagctctttacgatacatgtactggatatcttcttaaaaagtcatttggaataaaagggtagccccagagagttttattgtggcaacggaggatttctggatctggatttgggtggtggtaacatggatctatacatgtgataaggggtcatagaataatacacatacgtactcaaacagtgcttgtgaaaactggtgaaatcagagtgggtgtggtctagtaaatgtattgagccaatgtcagtttcctggttttgatcttgtacttcagttatgtaaaatgttactatggggggaagctgggtgaagggtgcatggggcttctctactgttttttcaactacttgtgggactttaattatttacaacacaaaataaagtttaaaaatgtcatttggagcatggcaaccagaaaaaatagattattcttgatatttgtgattcttatagaatatgaatacaaatacttagaaatatttgatgaaccctggagggtaaagtcttttgtttcaccttggtcaaaagtgaattggaaagtttagctcagtctttgtattacaattcaaggttatatgcttgcaacatgaaagtcaaaaggccgctgtcgttacaacccttggaagtccagccagaaatgtccttgttgcctaaaattaaataagcttgtgccatagaatgaaaaattgcttacattagtcaatggaatgaccatgtttcaaaaaaaatttcaagtttggtgtgtaactgtaaatggaaacgtgaaatatttggaaaatgtaggatttattgggaattattgtaattgccttaactaatctagactaaattaaccagagagtaagtccagttagtgagagaataatgaatatgtgattacttttaaagtaaatatgttaaatcgattgctctgttctttttcctctctgttgttcccctttttattttatcttttgtgtttgtagtttgagataggcagtgtctttgtttttctctggacaattttaattgaaataattcagacttagataccattcagaaaagatatatattaaaatatctttattagcatcaaacaaagcagtagtgagaaaaaaagaaaaatctttagtaagatcaaggaaaagtgaacgtacaaattcggatgaaaaaggagaaacaaccatagatagagcagagatgaaataatgagaggattctatgaaaaatgttatggtaatagttcgctgcaacctggatggggttggagaccattattctaagtgaagtgactcaggaatggaaaaccaaatattgtatgttctcacttataagtgggagctaagctatgaggatgcaaagtcaaagaatgacacaatggactttgaggactcgggggaagactgaggggggcttaggcataaaagaccacatattgggttcagtgtacactgcttgggcgatgggtgcaccaaaatctccgaacccaccactaaaaaacttacccatataaccaaacacgacttgttcccccaaaagtattgaaataaaataaaataaaatttaaaacaaattatggcaataaacttgaaaaattaaaaatggacagacctctagaaaacagacttaaaaagaaataggttcaatatttctatgtttaaaggaaaatgagtaatttaaaatgtcccccaaaagaaaacaccagaatcaaatgactctacagataagtctgccagattttcaggaagtatattacttcttgaaaagaaggagctgaaaggctccccagcttattccaagagaaagtgcagtagttcccccttatccacggtttccgtatccacagtttcggtttccacagtttgctcttgaggtctgaaaacagttgagtatagtatagtaagatattttgaaaaagagagagagaccatcttcatataacttttattatagtatattgttgtatttgttttattatcattaatcttactatgcctaatttataaatttaaatttattttcctaggtatgcacgtataggaagaaacatagtgcatatagggttggcactattcacggtttcaggcatccattggggcccttggaaggtatccccctcggataagaggggaaaattgtataacttgaaaccacacaatgccataggaaatgagaacatcgccagtctcacttacgaactcacacataaaaattccaaatagtaaatatatgaaagcaaccctctaaactttctcattaggtccaatgctttgcaatgtgtctcttcttttcctattatttaatcttaatagtaccgaactggactccaacatcagactgaaagtcagagtccttgccgctctcctgattttaaaggcagtgatgtgaatgtatcaccattaagaatgtccttagctggctgggcgcggtggctcacgcctgtaatcccagcactttgggaggccgaggcgggtggatcacgaggtcaggagatcgagaccatcctggctaatacggtgaaacctcgtctctactaaaaatacaaaaaattagcctggcgtggtggcaggcgcctggagtcccagctactcgggaggctgaggcaggagaatggcgtcaacccgggaggtggagtttgcagtgagccgagatcgcgccactgcactccagcctgggtgacagagcgagactctgtctcaaaaaaaaaaaaaaaaaaaaagactgtccttagctgtagggatctttttaatatacactcattatcaggttaatggagttctttctatgcctggtttgctagtttaaaagagacttaagaggtagaataatcaagtgtcatgagtgaacactggctcctgatttcaacacacaaaatttagacagttttttagatatttgaggaaatctgatcactttaacaattttattattattttacagagacagggtctcactctgttgcccaggctggagcgcagtggtgtaatcatagctcattgcagcctcacactcctgggctcaagcagtcctcctgccttggcctcccaaggggccgggactacaggcaatgccactgcacctggctgctttaacagtttttaagtgtacggttcagtggcattaaggacattcacattgattgtgccactatcaccacttcctctccagaactttttcttcttcccaagctgactatttgggtacttactaaacctgaacttcccattcccctctcccatagcccctggtataccattctcctttctatctctatggatttgactaggcttgctacctcatataagtggaattatacagtatttgtccttttgtgggtggcacatttcacttcacacaatgtcctcggggttcatgtggtaccatgtgtcagaatttccttccgttttaaggttgaagagtattccatcataggtctgtaccacattgtgtttacccattcatccgtcagtggacatgtgggttgcttccagcttttggctattgtgaataatgctgccatgaacatgagtgtacaaatatccgttcaaggccctgcttttaatgcttttgcatatatatccagaaagataattgctggatcaatgctaattttatgtttgtttgaggaattgccacactatttgctacagtgctgcaccattttgcattcccatcagcaaagcacaagggttctagtttctctaaatctttatcaacacttgtcagaaaatgcccatacttttaatacatctctatgaagtagggctgaagaaggagaggagttactggtcaccattgcctgcacagcggccatgcccacctatgatacatgagccattcacccgctgacaggcagacgaccctccacacaggctgccttgctcttaaccataaccaggcctacattttccatgtgagcctgcctgtacaacttcatcatgtctctaaaaaggaaaggaaaggaggagaaccgaacagtgtatgatttagtgatacacacatgcagtagaattgttaggttttaaagggcaggggagtgataaacattattcctgatgtgaggtacctttggagagaagcagttgaagaggatcaggaaagaatacaacagtctcagtcactttctggttttcaggttgggtgatggtttccttggtgctttactattatgcttcattacctccgtaaattgcatacatccttttgtatgtataattacataatttacattttaaatcttaaaccagtgacttttattccttaaggcttttgttcctatgtgttggccaaaggtctaggacaggtgagaaatttccactgggatggtctgaggcagaaaggagagaaggaagtgagttttataaagcttcgtttgttcagtatgtcttccctattttatttagtattaaaaagacttttagaaatgcagtggtagagttagagcatgcagtttgttgttttgtttttattgtccttaacaatggcaagcagaagaagcagatagccttgtgtaaggtcattatcatttcaaaaactgtcttgactggtccttgaaatttaaaaattctaggaattattgcctcagagaacacagcgccgcattcaggagccagccaccaaggctgatgctcagtgagattttgcttactggcctttcacagaatgcctcactcgaattgaaaaagctaatttagagggagcagccgtcagtcctatctgtagactcgtgaataaatttgaattactcagcaaagacatactccaagctccgaggacctggattctcaaataacagccaatgattatcacagctaacattgattgggtattgactccgtggctttggctattttgtatagattgtgtcacctaatctttagaaatgttattatttcaatttacctgatactgaaactttattatttaactcagcatcatataggtaagaaaaaagctagaattcaacaccagcgtctcagtttgacatgtcaccaacactcttaactacgacttaattgtgactgcatctggccccatcatcagtaagccaaatgctaatgggtataaagtaggtactgagggctgaatttggaactcagccctctccctttctctcccattcatatttcttgaactgtctggcatttgaggagtcttgactcatatagcttgaattgctgcgctcattggaaacattactgttttaccattgtggcgttcaggtgcacatacaggcagtaacctaattgtatttatttcttatatccctatgagacattagcaaacaaactgtgtacattcaatcgcaggcaaaagagtggggggaacggaggagttctgagcaaacttcagtgatcagtggctgaggtatgatgaggagagtgaggaaggtggtacagctttgaggtaaaaggcacaggagcagcttagaagaccagacggtaatgggatgggcgtgagagtttaaaaggttgtgggtggcaatcagaggctcgtggatgacactaaggaagccgtgcatcttttctaagaaggataaaggaaaagaaagttcagagtacttcatgatattgttgttttggtagaggaaaaattggaaaatccacatatgaggcaatgggttctattttacattgtaataaaaggaatgctttgaactgtgcttctgttttctcatttttagattttttatctcctcacatcttcaaatctgtgagcatttgccaagattcttccttagtcgtacatatgggctcccagcattgcacaacacttatccttaaaagttacatgcaatttatccccttcctggcatggtcagacttcccttttctctcctccctcctcttttcctcccatccccctttcccttgttgtgttagttgcctattaccgtgtgacaaatcccccaaaacatagtggtttaaaacaacaacgagttaccatctctcacagtcttgtggaatgaccaggttcaactaggtggttctttcaaggcctcttgtgcagctgcaaccaggtggtggctggggctgagtcatgcaaaggacatccaagatggcatcttcataacacttctggtgcctcagctgaggtgcttggggacaggctggacagtttgtgtgttctgtctctctcttctcccacccacccccatctctgttctcctctcccacccctctgtgtagcttctctacatggctagcttgggcttcctcacaacatggaagtttcagggtagtcacacttcttagatgacagctgtctttcctcagacaagcattccaagaagtctaagtggaaggaagttcaaagcttatgacccagccttggaagtcactcagcaccactgttgaagactttcgttctgttggtccaaaacaggtcatacagccagccacagagccagctcagagccacccgaagggagcagaccacccacgggcatagatgctgggagatgtggtttattgggaatggcatacctctcagaagaccagctaccacatttctcctttgttaaaaatgtctgtttctctgctccttataactgaaatatcttaaagttactgtcttatgtcttatttcttatattttttctaaggaagtttattgaaagacttctttgaagaattcttacacatgctctccagcgaatcttaaaatattattttcatttagtaatattacaattaggcctccaaaaagctctatagagaaaagctgtgtgactgttttttagaaagtctctttggaaaatcagatttgattcactttttaaccaacgatgataacatatcaaacttaaaaggcagatcggttttagggaaaagtgatacaccgtcctgtgtgggtgtccttgagtgaacttcccaacaatattgcttttcatgcgtagccactaattagaaaacctgctctcttgttggggctaaactgtggtttacttttctggttggacttcttcttgcttatattcaagcttttacagaagccaaagcttattcttttttaaccctcaaaataaaaaaaaaaaagaactcgaatctaaaaaatgtgttgtgtaattacatggcagtttcagaaattctttttaaaaaatcttgtacctatagatggcttaacttagcttctgcaaatgccattgaggacttagattcttctggggagttagctcttttttttcttttcttttctttcttttttttttttttaagaagctaaatctccaaagcttttctctggtaattatgaaaaacaacatgtgtaagagaaagtgggaagttggaggtggctaataatttgatattttttctacccacaaaccttgggaaaactctgctataaggattaatttgctcatgagatttcactttggttgccattaaggaaaaacgaacaggaacagcaaggcagaagtgtttcttgactctggggaaaagagtcaagggtttatggtgggaaacagagcactccttttttccttttacagcaattataagtgaggcatctgaagtttgatatcacttttctcacacaggactttgtatagacacctaaaatctgactgaaaaatcatcagtaattgcaatttctcatttgtcttcatgcgggaaaaagattttattttaaaaacgtattttttctagcttcattgtggtgtaattgacaaatattgtatgtatttaaggggtacaacgtgatttgatatactaatacatatacattatgacatgattaccactatcaagctaattaatgtgtttatcacctcacagagacacggctttattttttttgtggtgagattgtcccagttcctggtaacctccattctattttctgcttctgtgagttccacttttttagattctgcatatgagtgaggtcgtgcagtgattgtctttctatgctttgcttatttcacttcacataacatcctccaggttcatccatgttgcaagtggcagaagctctcccttttttaagaccaaatacaaatgcatttatgcacataccacgttttcttcattcatctttcagtgcacaataggttgattccatattaaaaaaccttttagattctatcctttccccccagttttttttttttttcaatgtaaaccatgagaaaatagcagtggctctgctctgttggtgatttccttccacatctttgtggcatctacatgcagattaaatgggggttccagcaacttcccagtgtggagagtcccccactgctcagagtcgtggagccttcaggttctaccagtaggaggaaggcataaatatttccactgaacaggcaaaatgtgaagaccctttacacttcaggcccaggcaaaatgctttgcccaccccccttccccacccgcagccatccccaccaatgttcagctcagggctgcccttggttatgtcaactgctgatggtgacacgtgaaccagcctgaggagggaagagtagccgggaggagagggggccaggaggacataacggggccaggatgggcggacgggttcttcttcattgcttcattaattctcacacctttttctgtgaagtcatactcttcccatttttgcagatgagaaaactttaacgcaagagttttcataacttgctctcatgcaaattcattcaaataagtatataagcagaagtatttaaactaaataaaatctaagaattttgcttcatcttgggtaacatgaaggattttcatctcctcctcatgggccagccagtggtctgttcactacccgatccccgtagtaagccgtgggtaattggtaatccacctatgaagtcaaacggggaaactggtgaggtaagcccgtggcacttagtcaagtaacaatagttgtcactctctcttgtttaatcttatagtggagtacgacaaggagttctcccctcgtcagcgacaccacaaagagttcaagttcaacttatcccagattcctgagggtgaggtggtgacggctgcagaattccgcatctacaaggactgtgttatggggagttttaaaaaccaaacttttcttatcagcatttatcaagtcttacaggagcatcagcacaggtatgaaggctcgagaaagccccaaaggtggggctggcccctgtttcccaccttttgtcatgacaataaccccagctatgtctgtgcagggtgacctggagttcaggggcagcatgtgagtacgatgaggtgggtgttgtaaatgggagtgtttagctggtgagatcttttgctatttgattttccaaatagctatcttttcctaagaaagctagtgaatgtatttattataagcatcttttgtgatcagataactccataatttattagggttaaaatgttcccactattgattagtcctcattttgaatgataggtgagagtggctaaaataaattcatacattaaaagtatatgatgcttgtaagtgataataattccagtgaatacaaggcagtgtatttgtgcacataagatacacatacacacatgtatctttgagtaagcttgtgtgtgatgtattttttttttttatcacttggatacaagggagcagtagactttttccatgtctgtattactctcgtttcctaaaacaaggccagaccattttacaaaagaactgcagtgaagcatgtgcatggagctgcctagcaatacagaaaaacttccatggaacaattgctggaggactggaagggctgagggatgaagttttatagtcgttagtacagaagaagccaatacacagaagccaatgacctcgaattttgcttagtatttaggggtcagtttagtaagtcagtgagaatcaaggcctttatgcatagtagaatagtgttaccgtgtagctcttagtgtgtacaaggtggaaattaagcaggtgatatgacggtctggcaattatatggcagctacaaggataaaaatgaagggaagtgaacatatgggggagggaactccatgcttccagactccgtaagggatttgtcagatttggttttataaaccaagtccaggttcccacttttggtcttgtgagtctattgatttcccaagaatttccaaaggcttaagaatgactttggtttttcctgaatgtattgatctgtgtgtgggtctgtcacaaatacacacacctgaactcataagcaacattaatttgtccgtgaaaggttcatttttgttttgaaagcaccgccagcatccagcccttgtgcatatttaggtctgtaatggggaaacacagaaggaggaaggacagatgccatgctttgggacatttcatggtatgaacatacatgctgatagttgtaggtaattcatagctaggagagctaaataatgagtaaaatacatccattgtggtatctttataatgggtcacaattttggaacaaaagggaagttttctgatatctgattctcactcctaaataaaaatatattcagtggctatactactgagggcctcttttgaaaagtacattttttgttgctagatttttgtctgttgatacttcagagataattggtattcactgactctttggaactgttttagccattgattttcagtctgcctaattatttatttcattatgtttctctggttagaataacctactggtatctttttggctcagaaatatattgggaatatatgtttttctccgtcctgcaggaaaacctttacagtgaaaaccctaggctgggagttaagtgactggcatttaaaaaaattgttatttgttttaaaaaagagagagagaaagttagcagaacatttgtaaggtttatactgaactccagccaaaaaagaacagctgccctgtgcttaggatggtggtgtcatacttcctcgaggccagcagtgagtttggaaaataaaatcctgaatggtcccaacctttgatgactctctatcaaagcggagagttgtagtttctttgccttctaggatgggagcatttggcacctgcatgtgtttcgttgttgtgcataggaaaggggaaattctgggagaactgggagagtttcatgcttttgaagggctccagtttggccaggaagagattttcttttcttatctgtgggccaggagcccaggcctcctgccgcctcctagcgttcttccagaggcctccagattcagctgcaggactcctttcgggggaaggtttgatctccccatctgtaccatcttggggtgtcttggctgaaaacaattctccaggcttgtgaagaaatgtatttgtctaatctgtgtttaagtgaaatttgtagtagttgatggattaactccatttaacaagggtttgtgttgcaaaatagttgacctccttgaaaaattaaaaacagagtcagggttttaaatgctgagtcacacactcagctggggtggcagaagttgtgtgtcagccttctgatattaaagacagttaggaagcctgacccagggagggtcagggaagattcttgcaagatgggcttttgctgtgaactctgcacaaacatgttcctttgactgaaaagaaatgacgggaccaggtaagtttaaaaagaaaaaaggtggctacttgaatagacggtacttttagtaagaacaagcaaacacttgatactttactcaaaagttgagaataagcccttagatggagtctaagtcatggaagatttgattgaagcaactcatagattagaatggaatcagcaacctaatagggaaacagtttttgcaaaaattacattggcaagggaaatctgacttaactgactccatcttgcttctacttggctaaattgctcttgctcattcttgtgcagaggccatagtggtcctttccttgaatggatccccttcatgtttaaaaattgaaactatatttgtaaagaggtcacaaggttagaattatggaagggggtcaagctttgctaaagaataggcataaacagtgacttgccattgatcagcttacttgtctataagttgctgactgccccagaatcatgtaactggggttcacaaagtgtatgacttccccaactacacctatagataacatcactattgtgaaagctaaagaacttgtctttgagatatttttcagagttagcatttcagcagaccacgagataccacctggtcctgagattccttcctaggaactgactcagctatgtgaagacagttttagacacccctgtgatttcatcctcggtcagtcagtgatttcagttccccagctccctgcctgtcaaagtaccctaaaaactctagcctccaaattctcggggaggcatatttgagaaatacctcctgtcgtactagttggctggtcctatgattattgacctctttctttgctgtaatacctgctgttttcagtgcattggcttttctgggcagtgggcaagaagaacccatcaggctgcaacaatagtctgcatcattaagcttgagtaacacatgatgcctttgcgctttatttatttttagaagtttacttcatggtattgcatggtgtttaaaagatgactttggtattaaaatttggtgttataaatcattgtgtccttgtgatgatgcaggtaaaaaaaattgcattcatatagtagttacagtttggaaaaggccttctcttatattttctcattagggttttaccatgaccttatcagatagacagggcaggcatgttatccttgagagaacaaagtatggcacatacgaattttgccaagaccaaataattcctaaactattgtctgctatgcttcctaaaagtcacttcaattatgtgggtacagtctcaagataaagacgaagtaccggaaagaggtaagcaacctccttatgacacatcctcacacctccatgtccttaggtttgaagcagacaccccaagaatgcttctgtttgaatggcaaatgttttcataggtagtgaagatctgtgtctgttagaattcagactctggtactttgatgtctaaggccttcctacagaaaacctttgcaaaactttgttgatctcttgaccaaccactgatctattaacagtttttctagaggaggggaatagaagggaagaaagattggaataaatttacacaaaagtattatatatttgtcagtttacttctttactattttttctgtattgcatgcatactaagctgacttcacaccgggagtatagactgctctgaatgacttctgacctttcatagtcacctatggtagcatcatgagtacatgcttttcacaacatgcactcatgatctttgttctgtagcacctttatatgaatagtgacattttgaggtctttagagaatatcattttcttctacgttttttacttggttaaaggcatacttttactgttgtaattgaattttgtatacctagaagtcaaagagcatctcttgaaagccaaccagaaattttaacagacacgttcaatatctgaaccgtggtcctgtttggtccatgaagatcggccacacttgtctctgctagttttgaaattccgtgttctgctctctgtgttttggcatttgcattgctcggcagtgatggtctatattctgtgtgtatgataacttttcttctccatgttctatcatggtacaatcttttgggagacatttgaagaattaccaaatttaaaatttatgttccatttaagcaatatcccaggttactcctctgtttagaaataggcaaggatgttttttgtcatttgattttagagtttggtttatatattcatcgtaacttcagaatccttaggctttgaagaaatgcatcttaaaatcaaggagggaaatgctgctctgtagttggtttccatgtttttgttttttgtttgtttgttcgtttttgaggcagagtctcgctctgttgcccatgctggagtgcagtggtgcgatctcggctcactgcaagctccacctcctgggttcaagccattctcttgcctcagcctcccgagtagctgggactacaggcgcccgccaccatgcctggctaattttggttttcatgtttttaatacatttttattgaagttaaagctacatataaaatttaccatctttactatttttaagtgtgtagttcagtggtaataaacatatattcttttcttcccccttcatccctccctccttactaaaacaggaagatttcctcaggcaagcacaggaggctgctgttggagtctccaggaacaatcccagactgaactattgctttaatttttgacagaattcacaaaatcttacctattttacagacagaatataattgtcccaggagagaaaagggtaaaaacacattttccagaatttttagtttgatactgcactctgaaccattcacagagatcgggaacacaggaataagcagagttcagatttgcacgtttgagtcatggtatgagtacccgagacgatgtgagatgtagaagttttgagctcagcagaatgagctaaactacagtaggagattgttgagaccacagggcgaaccactgaagtaggtcacatagaccagatgtgtaagaatagaaaacctaattgaccctgtaccatttattgaaaatactatctttttctcatgtgctttagtggcaactttctcataaattaggtgactatatatgtgtgagtccattttttggatcttctgttccctgggttaatttttctcttcttgcaccaatactccactgtcttaattccttcagttttataataaggcttgatatctgatgtgtaacctcaaaattgttcttgagactttcttggctattaatggcccttcacattcccatgtaaattttaaaatcagtttgtttccacaaaaaataaaaacaaacttgctgggcttctgattggaattgcactaaatctagagatcaatttgggaaggatttacatctcatcgataatgaggatttcagttcaagaaagtggtatttacttaggccttctttaataactctcagtaatatagttttttgtatgtcttgaacatttttattagattaattttaggtattgaagtttctgatgctgttgtaaatggtattaatagttttttaaaaattcagtgccaaattggtttttgctcacatatagcataccattgattttaatttgtatccagcaaccttgcaaatttacatgttaattcgaatagtttttctgcatggccttttggaatttctgtgaatataatctataaatactagttttattttttccttttcaattctattttttatttctctttttcttgctttattgtgctggctgggacgtccagtacaatgttgaaattgttcagatttccatcagatttttaaatctcaggtaaagatttaatatttcatcattaagaatgatgattgctctaaatatttttgtagataactcttcagtagataaaggaaattcttctctatttctagtattctaagagttttttaacattaggaatgggcatggatttatcaaatgtttttttttaattttgggacaatcatataatttttctcctttataatgttatgtgtctgccatattaaatgacttttaaatgttaaactaacctcatatccctggaacaagttcaacttgtgctttattattctttttatataaggctggattcaaagaccatatctgataactttgctatctggatcacctatgggtctatttccactacctgtttgttcccttgatttttccttgtttggttttatttcctggcaagactgctaattttctatttatgaaattctggacattaagaaaaaagttctagatactgttatctccttccagactagattcaatgttcttctgtaaggcagacaaaatatggccaaatcacctttttctttttgttccaggttaggcagggtttaaggatgtattaaggcttatctgtttatggttttccctttctcctagagtttagccctttcagctaaaagtctaggatgctgggcacagcggctcacatctataaattcagcactttgagaggccaaggtgggaggattgcctgagcctaggagttcaggactggcctgggaaacataaagagaccctgtctctacaaaaataaaaattaaaaaattagccaggctggtggctcatgcctttagtcccagctcctcaggaggctgaggtaggaggattgcttgagcctgggaggttgaggctgcagtgagctatgattgcaccactgcgctctatgctgggcaacaaagcaagaacttgtctcaaaaaattttttttaattttaaaaatcttagaaaaataaaaaaccataaaagtctggaatgtttacaagagcccctcttccttggtggactctgtactcgattttttagctcctcagcactgtgagactgccaaaccctctgctttgcttttgagcctctaaacagtttctttctacttgttttctcaactcctcgtcccatataaacacagcttaatatctggtaaatacctcaagtggaaatgttggagttcaaggaggccaggacttgaagagccagagtcctagaggaaagggactacacagaagtgacccaggcttctatgagatcacttttatgagctcatttccatgcagccccctttttttctgggactttagctcttctcacgcactagctgccttgaattttgattttctccccagctggtgatactgcgtaaagctctaggccgctaccaattgctgcttggtgtctgtgcctcgtactagaaattatcaaatgccctgaaaggaaaaggcagcagcaaacacaaggctcaccttaatgcatttcctttctccctgaggtcttgacccatctagtgttgccttgcttggttgctctaagagaacttcaaacaagtgtgttttttagttaattcagtattttttttagtgggaatgttagtttgatacatcatgaccagaagcttaagtctttgaagtatagtgtgttttatcattttcatttggaaatctttttaatgaatcccgacaaatgttgacatttgattcagtaatgaaatggcatagtcctggaaacaagatcgggacccaatgttgatccatttccaggatggaggagagtggtttctttagaaaaacattacctatggactgattgctctataaaatctgttggattttcagtgttgcctgctgaaatgaagacaaaagttcaccctttttagatacctgagacgggtttcttttttgaagagaagggcaaatttgagaaagccaggatgggagaacactatattatagtttgggcagaagaaaaccaaagccttttatccctgtgcccagccacacctttttctctttctgtgtctggctttcacaggcatgatccttagggactcctgaaatcttactgctgacttgataatctctggctccctctgtgtgggcctcgagaggcaagcagtgagcttttcagtatttgttcctttgcccctgaaaaagggataatacaagtgacccatggttcaggttatgtaactggttagtttcatcttcctagtcaagggcatatgacttatacctagaacggtctacttggggagaaaaaaaaaaagactgctcaaggagccatcagaccttcttgttcctcagcctatgttctgttcttggtaaggcacagggtagaagagaatgttatggagaggaattaaagttataaagaatcatatacactcaaaagaatgctaaaacattttatgctggcgggaagagccagtgggtggtgggcaggagacgctgttctttgggaactgcttatctacttggtaaacatgaagagaaaagaaaataggtttttatttctggaaactatgccttatatatttatcattcatgcctcgaaacagatcgctttggttacgtgtgtctccatactatgttgtccagctttgtgggaggcaggccatgccggtggttaagattactttgtaaccccataaataggtacatctactatatatacccataaaaactaaaaataaaaaacttttttaaaagattactttgtaaaacatctttttaaaaaaaaaaaatcaatagcacttttactgtttcatttccccaccttggacgggaatgtggaaatgtagggttggtgatgagaactaaaacatgtaatatttgcatgtcacatgtttaaaaggtagcgggggctgggtgcagtggctcacgcctgtgatcccagcacttggcgaggccggggcaggcgggtcatttgaggtcggaagcttaagaccagcctgaccaacagggtgaacccccgtctctactaaaatacaaaacttagtcaggcgtggtggcgtgcacctgtaatctcagctactcaggaggctgaggcaggagaatcacttgaacccaggaggcggaggttgcagtgagccaagatgacgcactccagcctgggtgacagagcaagactctctctcaaaaataaataaacagacaaactaactaaataaaaataacaggtgacaaactccgcacttgatcactagtgaagattagagtataccccagtgtatggaagcattgttgtgtttatgtggccaaagagagcagactgggtagccgtcagtttgtataaagtttccatcctctttccccctcttaccctgccttggacatatagaaccaagacttctaataacactgatactttggactcgatctcacctgcagttctgtttattagcctaattcgatgacaccctgagggtcatgcccatccataagacacactgacttgtggagcagcctacatttggtttgcactgttttagggagaggagcaagaaatcttgagagcagatagctttcaactctaagttcacaaaacaggcacaggtagtcctgctcatatttcatggagaggtagtctggctttaggtccttggctcacaaagtatggttcttagaccagcagcatcagcatcacgtgggaacctgttagaaatgcagattctcaggcccctccccaagcttactgagtcagaagccctaggggtgaggggcagcaatccatgtgttaagcccccgcaggggattctgatgcaggctacacttgagaaccactgataaaagagcacgtacaacacatgagccaaactgcctgggttcaaattccagctctgcccttgctggctgtgtgaccatgtgcaagccacttaatctcaatctctctctctctctctttttttttttttttttttttttttttgagatgagttgtgctctgtcgctcaggctggggtgcagtggcacaatctcagctcactgcaacctgcacctcccaggctcaagagatcctcccacctcagcccatgcccagctaaattttttattttttgtagaggcagggttttgccatgttgcccagtctggtctcgaacccctgggctcaagtgatctacctgcctcagcctcccacggtgctgggattacaggtgtgagccaccatgccctgcccacttaatctctttgtgcctcagtttcttcatctataaacctgtaacagcattaatagtatttacctcttacggttgttgtgaggcattaatatatgtgagagtacctagaacagtcgcatagtaaacaccatgttaaggtttgctatgttaatattctaacagcaaagtgatttatattggttttttaaagacgaaatagcccctacagaatcaaggtgcatttgatatttgaaacgtctcttcataccatgctagccattgggtgaaaattgagtaatatcaaagactgtaaaaaaaaaaaaaaaaaaaaaaaatgcaagtgtagccaaataatgttcattcatctttgttactcaaatttgtatgtgtacatgtatgcagcagtttactcttttttgtagtactttattttcaaatatatgatgccttttctatctttctaatggtaaaagtttaaacataatctatactgtactttacgtaaggaaaaagtaaaaagcatgagcttgactccttaattttctaaaatgaaaatggattttttttactttcattctatttgaaaaatgaatttttcttattgcagaaagtcagttcctccatgtatgaatgttgttttgtattttaatgtaacatcaagtccagacgtacaaatgcaaaggaatgtgttatggagaaataaagaacaagaccacagaatcaccttactgagtatttcataaatctgcttactttgaatatataaatgccagtttatcaagagcatttttttttttttttttttgagacggagtctcgctctgtcgcccaggctggagtgcagtggcgggatctcggctcactgcaagctccgcctcccgggttcacgccattctcctgcctcagcctcccaagtagctgggactacaggcgcccgccactacgcccggctaattttttgtatttttagtagagatggggtttcaccgttttagccgggatggtctcgatctcctgacctcgtgatccgcccgcctcggcctcccaaagtgctgggattacaggcgtgagccaccgcgcccggcctcaagagcatttttctatcaaaatggttagtagtaaacactgttgtactttgaccccggcattgtgaccttgatgggtgtgtggtttgtcaggaaagggtcgaagcctgtccaccaggagctcaggcacctcctgcccttgtccgagggcaaaggagagaaaggcctgctgtattttggcaatggtgctctctgtcagcccagtggtgtatcactgatgtgagcatgtgccttggaggctgtgtgatgggagggatatgcagggataaatcttgcccacaaacaccaattctactagtctttatgagtggctttctgattcatcaactctaaagccagggtgaatttttgaaattttccagaaatatcttactagcatattaatttgttaagaacctcatttgcccaggatgaccacaatgtgaggaatatcacgctctgaggttggaataacattgagaagagtaacactgttacatccttgaagattggaagcgtattcatcatgcaaatgtagggtctgagttagttgagaacaaaatagtcaataactgcattaaaaattatcttcccttgtttcaagattttctttcgtggtttgccaccttgagagtatgtcacctcaataggaaggtccaagtaatctaggcatggtgatgattttggccagtctctaggattctttatcagtgacacacattttaggtgagaacatctcttctgaactctgccaaagtgagatttagaagggaaagcttatttttcacgtggcaaaatcagatgcatcttcttcgaggctacacttttacagtccgcagactaggaaggccatgtatccctgaggaaacattagtacatgtgggtcagaccagaaccgttttagtgatttgtcatcaacagcatctcttcaatatctgagttgttggaagctttgagggtgagcccataaagttgtgtcttaaagcttcattcctttttcaagttcctctccctcgtggtgtgaacatattagtgatgttctcatgctgggcgcagcatattctgcttggaaggagcagagcaagattgggagggtcactggggctccaccactatgccaccatctacagctgacaccagccacctcgggcgccttcctgcacgcactctcatacctacctgaccctgatgggggaggcccactggtgatcgatttatttatttatttagacagggtctcactctgtcgtccaggctggagtgcagaggtgcgatcatggctcactgcagcctccacttccccggactcaggtgatcctctcgcctcagcttcccgagtagttgggactacaggagtacactatcatgcctggcaaatttttgtatttttttgtagaggtagggtttcgccatgtttcccaggctggtctcaaatttctggcctccagcaatcctcctgcctcagcctcccaaagttctagtattacaggcatgagccaccacacccagccttcccaaccggtgatttttaacctgtgcctgtcctgtgtatcttattgtattttctgtatccagctgactttagcatttgtatgtggtagactttggtcccttactttattctgagcccttggacagtactttcagcctctgccctgtctgcttcatgactctactttttagatatgtgacggctaaggacctgggccctgattaaattccatttgccccacttaacagccatgtgaccttgagactctctctgggggctcagctgtagaagagatgacataggtcctgccttttctggctgtcctgaggaataaaggctgttgacacagtcaatattcgctgttcctctgtcccacttggcccaatcatcttaagtccatgctctgcctcacttcccttccagaggccccgagcatcctagatctaaacattgaagtccaagccttcctcgctgccataggaccacatagagttttcatctttcaaggctcggccactagactgcacttgttgacctcacaagcttcttaagcagtgagaacagtcagtgttctcattgtacgattacaaaagtgtgccacagaacaacgcaaattcatggggccccagagtgactcggtagcagagtcgggatggaaactgggctctccacatccacgaatctgcactgaccccgtaggtgcaattgcttcatgtcatgatgggtaatcctcatcttccgcctttgccccaagtttaacttttgattcatgttctccctctttaattcattccttctctttctgctcttctctgttttcctcctcctccttggatgatgtgcgtctgcctcattccccacattctcttggacgaggctgccattttctttatcacagaccctgatctttaaaaataaaagctcattctgccagctgtgctaccctcacgctttgaactgtatttctctgtatccttattataagtctttaaaatgtaggtgcctaatctagtcatcagaggtaactcggcatgtgctcacgggccccgccttgagggcagccttacccccgagattcccactgggtcttggtgctagagagtgccagccacattctgcccgtgacaccgatgtgtgccgtgcttcctctgggaccggggctactttcccacagtgctgtctgtactgtctgtgttattgctggataagggtcttctgtgaccttccagaacagaattgatgtcctcttacatctgacttcaaagccttggccttccagtctctgcttgctgttttccatggacaccccccgcaccccccgcaatctccctgctcacagttgttacctcagtgatggggggtaatttgtcaacaggggatgtgacacatccacatcagagagagctttcaactgggcaggccagaatgtggcctcccgcagactctgttaagcagctgagtaaatgacttttaactgtgcctactgtttatacttgggaaagacgacaatagagttcccttctcactttaagtggccatggaggcaggagaaactgttcgctcctcctctgagaaatctaaccatttgaacttgatgtttcactggcctcgtaagtatttgatggattaaagatgaagttcattcattcatcacaggtcgtctttggtaatcatctcaatgagacagtatgttattatggaaagctctttgaatccaaaactaggtcctgttttttcacttgctagcttgagatcttgaccacatatgacggtagccttgtgtctgagtctcaggttccccagctgtaaggtggagaccgtgacactctgcctggcttttaggattggtgtaaggaccaaacaaagagaagtagatgaaagcactttgtaacttatgtaaatgtatgcttatcttaaacttagtatttaattttagtcgtttttctatctctgtaagatattgcagcaaaatatttccaataccaggagctttgagtctttccatggccaaaatatagccctccctgtcatgggaatcccaggccatctcattctagtggccatgggatggatacgcagattcagattgtccctaaagatgaccatctcctggcactgacctatcataaaatgcaggtgagcagaaggagaccctcacaccgtcatcccacagccccttgattatgttagttcaaaactgtgaaaaagtcagtcttccctgaagggcctaatggaaggaatggattctctgactttgcctcaaagaaccccagctgtagctcaccactgtgctgggatgaactttaaaatcactcagcatccaccctcggctacacagtccatatggggaaggactgggtactcactgcagaccattcagaggccttaattaaaatagtagatgattacttaggcatgcgatgtggcttcttgtttctccttatttcataggaacaaacgagaagattttcagtcccaatttcaaaacaagaaaaaatgagcaaagcccagtttataaatgctcatatggatcctgatttttatcttttctcaatcctgtttctcgctgtctcctactttccctgtttttagagcttattagccataaagtaagctagtcactaatagtatcataaataaatttttaaaacataatagaagtattaaaatgtaaatgccactgcactacagcctaggtgacagagtgagacccagtctcaaaaaaaaaaaaataaaaaagttttttaaaaaatcatttatttgtaatttatcctaattcgcaaaaagatctgtcataagcagcactagcaagatttttggtaaagttgagagggtctgccgtgtcggggtgaaagctgatttctatgaagcgccttatcagatgtgcctgtctctcctaattgtgtcatgcctgtgtcctgggtggtaccacgcctttcagggctatggcaagtcactgtgcttgtgcctcacaggtagatgtgatctgactcgggcatgttttatcctgacgctgagacaggaaagagtgggaaggagcttcaggcagtgcgctatttaccaggccattttttctttctttcagagactctgacctgtttttgttggacacccgtgtagtatgggcctcagaagaaggctggctggaatttgacatcacggccactagcaatctgtgggttgtgactccacagcataacatggggcttcagctgagcgtggtgacaagggatggtaagttattatccgcaagcctccaacgtccagcaagtcatcagtttcacacatttcccttacagcagttgtgatagaaccgtgggcaacaggcaagtcctcagcttcaggatggcctcatttactgatcccccatgacttgcattgagaaccaaaacctttcccggaggcctcctagacaggaattgaaaacaggcttgggcaacttggagacaggagagtggtaatgtttccaagaggatggcgatgggaggacagcttttctaggcagaggcaggttgcgggggatgcagcgagtaagagagaggcaggcgcatctgtttaaatcctgacggatgaacaggtttgcagtacccactcctcctgcagcatcagagccagcagcttgaggtccccactgctgatctgtccaccagggagggcagggtaactgcagattcataatctagcagaaacaggagagcccaggagttcacgccactccttcatgtgattctgaaactttgaaaggagtgctttgattctgccaaaagatgccatcccatgggtgccaggcaaggtttggggatacatgatcttcttcttcacactcattcttaaggattagcacttaggaaactaggaagtatcccttaactgttgtagctacaggaacaagtttctgtggaataaagagatgcatgctttgatttgcattaaaggagtccacgtccacccccgagccgcaggcctggtgggcagagacggcccttacgacaagcagcccttcatggtggctttcttcaaagtgagtgaggtgcacgtgcgcaccaccaggtcagcctccagccggcgccgacaacagagtcgtaatcgctctacccagtcccaggacgtggcgcgggtctccagtgcttcaggtgggtttgtggggagcctgtgtttccagaaagccttgttggcctcagtgagaacaaaagttgtgtccacagtctcagatgtcgggcagcttctgcacagcaaatccaaaggcaaataggtgtcatatgcatgatggtaccttgtacagtcgcagaacatctgcgtgggttctgagggccctcagcctggaacacttgttacctgaagactcaggctgcccgcatcatgactgcctgttgatccagacaagcatctttctgtttggttacatttctccaactcttttttaaattcccatcaaaaccctgggagcacctagattcttttttctagttgcgttatgctggggggttatgatgtgcaagcgaacttggtacagttgtgtaatatgaacttgtatttgtcagtgctcttggctggaagggaaggaaggtcaactcagccctctaggatggatttctttggctcatttaatggagaggttgagggtttttttgttgttgttgtttgtttttgggagacagagtctccctctgtcgcccaggctggagtgcagtggcacggtctcggctcactgcaagctccgcctcctgggttcatgccattcttctgcctcagcctcccgagtagctgggactacaagtgcctgccaccacgcctggctaattttttgtatttttagtaaagacaggatttcaccatgttgaccaggatggtctcgatctcctgacctcgtgatccacccaccttggcctcccaaagtgctgggattacaggcatgagccactgcgcctggccaggggttctgtctttaggcatggctggatccatgggctcagatgataatcaggaatctctctctttttctgtttttctatttttctttgttggtggaattcttagtaaaactatctctatatggtggccaggaaggcaaccagtggttccaggatttttgttacccttggcaacctcaacctcagacagagcccttcttcagcagaaatccagggcacgactccggttggcttggctggggttgcgtcctccaacctgaagcacactgctgggtggggagtgctctgattggccagacctgaactgtgtgctcacccgggagctaaggaataaggtgagtcccattctgctcagaacagacacattcaaagggcaagagagagaaaccagctctgctacctgagtgtcagctgagtggtccttcagaagtgttctccctggcagggtgcagtggctcatgcctataatcctcacactatgggaggctgaggcgggcggattacttgaggttgggagttcgagaccagcctggccaacgtggtgaaaccccatccctactaaaaatacaaaaaattagctgggtgtggtggcatgtgcctgtaatcccagctacttgggaggctgaagcaggagaatcacttgaacccaggaggtggaggttgcagtgagccaagattaagattatgcctgagtgacagagcgagactccatcgaaaaaaaaaaaaaaaaagttctccccagtgtgtttttaggaagtggcatggaagtccacccatggaagcccagaggaagggagagtggatgttccctccccacagccagtcccgtagctagttaggattgaatggaaacccagacacttctgactctaatgccagtgcttgcaaattctggggtcctttggctatttaaatagcttgagaatcaaccataaaggtgaagattggcagtgggatttgcagccagagaacttgtttccctggttgctaccctgtgattttggacacatttaatctgtttcagcttccatttactcatctgtaagatggggatgatgaatgccttgcagatttgctggaattaaatgaaaagcatcaaaatctggctcataatagcactcaaagattatttatatgccattgtaggaagtaggttctcagggcatatgttgggatccctggaaaacaagtaaaataattctggaagatgcattaattcttccaggtaattgtacagaaatgtcatttttggtggccaaacatgttgggaagagttaatgcaacttcccaaagtacctatttcttctttgggaagcagtgtctccattttgtgttccgacttaaatcaaccatctattttaccagtaacttggatgtggagcttgaggatccaccgcccagcgtgatgtgacattttgcttcttgtcatcctggtgtttctcggaagcattgctcacagcatgggtgttcctgtattcaccactagaaacagtcagggttggggtttttgaaaaagagaagaaatgcttgctttcctttattcacttcagaggcagcctgctgaacagagttaataatctcagtgttttccttcgggctatgatgatgaagtctgccaatggtaggcttcaatttattaatggaagtctgccaatggtaggcttcaatttattaatgaactgtggtcagtttggtgctgggacctcagacacagaggcatctcttgaaatgttgattgctttttaaaattaaaacttcacttgattttattcagtaccccccacccaatgcacacactaatgtttttaaattgagaaaagatgttgtgtctgattttgattttagcaatatcaaccaattattattttccaagtccctttcaacttttttcaatttgatgagtttaaattaaatatggatattcaagttgatctaattagtaataggtgcaaatatctctgtttttcagtggtctccccccgcccacctcccaagccagtacttccaaatttgctttgtccctttcagtagtacaaaggcaaaagggttcatacgaaatctctccggtctcacctatttaaaggcccccaagaaagaatgacgatgaaggatgctccctccttctcattctcttcaaagatcctctaagtgatctgggaaattgctcatgtctggcccactgaagcgcttctttatatttttggctctttcttccttatctattcttccattaatgggagtggacatgctgaggaagagattcccagaaaagatttccagagagatggcctgctacctggagaaatggcctgtctggtgttcctctccctcggggtctctgtgaggccagatgttgctgggccttcatgaaccaggtagacattacagtaacagaaaagtggtgtactctggcgtgactgcaggcagactttctgcttgtaaatcttttggaagttggaaggaaaagattgcattgtctctgctgcccccttcttccatggcgtgctcccagggagttgatagttctccaccaaaacaaccaccaccagaagcagcccaccagggatcgtcctacatctgggtaaagaagttagcattcattcatcaaattgcctgtcatcagggtgaaacgtggcaaggaaataagaggctatttttggaattgtgctgtcagtgcctgagacggcaagactagtgcacagcagtggagaggccaggagccccaccacccaccaaaatctactcaaacatttgtacttggctttcaagctggactttccaaacatgtgcactggatagtggtttggatcgacgtctccctggatggctttcacttgcccttgcttctctgcagctggctgctctaaatgaaggctggatgttggttggctctgttatacttctccaggggcttggatagcctctgcatggtatcatttattgtttttacacatgtttgactagtcctggtcctagccgtctttgccccattggggattttaaccaatctaccaattctttttcagcctccatttcttaccagcctgctgctcttgcaacacctgtcctcaggttctatagctccagtttggtggtctccttctacttgttatcattcactctcttttatggtagctctcacttggggttcactattttatcttctgggggactgtgataccacttggccaatccatgacaaggtccatgaacaaatggccttgaagttccattgggtgattctaaattttcatttggctaattttccggatctttccaagacctcttttgagagggtgtagctaaagcaatttcaggtcagctggtaagtctgaagtctgctctgctgctgctgctgtgaggcagaattggtctttgttttgatagatgagtttggaaacattatctgcactttaatgatccatgtgaaattggagtagtctctttcagtcttgatgtttatgttgtcactacccagctctgccaaccatctatgacccagcagcctcttgagacactgtctgtcctttggaatgagtctgccattgtatcaatgccacctattagcatttcttttttgtttgtttgtttttaagacagtttcactcttgttggccagactggagtgcaatggtgccatctcagctcactgcaacctcctcctcccgggttcaagcgattctcctgcctcagcctcccaagtagctgggatcacaggcatgcaccactactcctggataattttgtatttttttagtagagacggagtttcaccatgttggtcaggctggtctcaaactcctgacctcaagtgatccacttgcctcggcctcccaaagtgttgggattacaggtatgagccaccacatctggccagcattttgtagagtaagttctccttccctccttttcccacccccaaacatgtatctttaaggaccttgggggaaattgtggctctagtacattcagggatactcctgaccttcttcttgatagtttatattttctgtcctttaagcttcccggttgggactattcaataggctttcagcgtaaattaaccaggagtcatctcttgcaaaacagctgtttgagtagtttattataactgtgcaatcttgtgctatacatttcaaggaaatccagtccagactgggggtctcattgttacagtgtcctcactacttcaccattggcttccatggattggggatagccagagctgactgggtcggtccaccatggacattcaaagcttgggaagaatagacacaggtcaagactgtgaactagcagtttctagttctccaggaaagttgggaattgtgatttgtcattgtgatcttaaacttttagggcctgcagcttggcttgcagatgtcttaagtagagtttggttcagggcttcctatatgaaatcaaaccttaattctccatagacatggaggacagtcatggcaaatagtgatctaaaagttagaatcaccaaaaaaaagttagaatcaaaagcttcacttctatcatgcacaactcttgttcgaggataatggctatcaaagagtggaacagactggaaagttcccttctacctcctcccaaggttcactccttgcaaatgtgcaaatggcaacaattctaaaaggcaataagaagaagcttatgcaggtaccgtgagatgcctaagtcattcccaatcattgccaaccctgggagggcactggggccaggagactcagtctaggaagtggcagagagtatagaaggtgcttagagcacagagggtcttagagctaagtttttaaaggaaatctttgtctatttgcaggacagttccatattcttttagaatcaagacaaaggctgaaaagagaccaaagtcccacccagattaaatggggccttatgagatcctgaaatctcctggagcaaccaaaaaatagggcctcactgttgcttctcaatgttgaccatccaaattataaacaaaatctagactctgatcaaactgtccacccccaccccagccctatcaactgttaggagattattgacaccagaaatcaaaaccccagtgtggtccctggcctcccgtagtgtcggtgacacaaggagctggcacctgctgcgcgttcttcaatggctgtattgattctgctgggcgagtgggagcgagaggcttgttttggataagatggggccgataaggcccagagatatggaaagagcggccaggcccatgaagacagaggtgccactttaacgacctctatgtggccctcacccttgtcattctaggagagaagggaaattaaagtagtgaattattccctctaaaaaacaagtttcctttgggaagagtctgtagcctgagctcaggaaagctgggaaatacatgtggagcatgccgctttgtccagtcccctgccatgctggtattttcttggctctgtgtgacctgctgagcggggacacccggctgagctggcagggcctgcggggtcagcccagggcagccgagtggcccctctgcagaagccctggtgaggagacgactccctgcccacctctctccctctccctccccacctctctccctctccctccttctcacctgctttctgtggtgtccctgacattctctctcccctgcctttgtttcccttctccctgtcttgccctttgtttcgctgtcctcctctactgaagttgcaaagcacagcaggcagggtcactgggacccaggctggctctggctgccgtgactcaggcgcaccccccctgggagcccacaggcttgctgcagcgccctagccccgtcatactcacagcagcagctgcgtggtggccctccagccccgcggtgcagcctccccgcacaatgcctgcctgagagtcaggatggtggctgcgcccttcccttctcctctgggtctcatacctatgggcctctcctggcctccagtgccagggaagcctgcctgtcactggcccatcatggcatatagggattgagcttcagagctaaccaacagtgggctcctttgcacttcgctgtgtgcgtggctcttcaggagggccagataaaaaggatgctggatggaattaacccagatgttatgcttagtgtggggtatgacccctgcattgggggtataggcaatgtatacagtgcatgtgccgctgcctggggacatggcttctgtgaggaagtcccagcccagctagccgccttctgttggggccaagggtgccctgtcctcactgcactggatgagagagctattctgcagttttcagtttgccttgggacgattaggatgccctgccccgtcactgtcacatgggccccggcagccttcccatttgttttctcctgtagatggaatgtctcctcagtcatcacaggggagaccaggacttaaggtcggggagcagaggctatcagcaaggaagctgattgtcaggtccaaggcctagcaactgagatgagaactccccaccagaactgagcagactgtaggagctcagcagagcctgtgtggaacgtgcacctgcaacaggaggagcaagggcaggaagatgctagaggacagagaaaggggatcagccagaggcgtgtgtgctgggagctgcagcatgtacccctgatggcccccaggaagggagctatggcccctccaccaccaccctcagaacaggactctcagatgtgaaagctcagttgtgtctcaaggacaagaagactccatcactgtgtcctccctcccatccgctggactccagaaaaatgcacctccatatggctcctttcaagttagcccccaacccctcccaggtgtactggcccccaggtaacatggaggaatgacagataatgaaagacacacctggggcttgggagagggatttcagagccatggctggacctgatgctttattccgaggtgaattctggattggaacaccccggtctcttatggtagaaaatggcaggcacttccacatggtcccgccatcgggaatggatgggacacttctacctgtttctctaccactgattgcatcgtgcagaaggcctaaatgagatgcaagcctccctttggcaaagtattggaaaaatgaaggcaacgtattggaaacataaaggcttcataaagacacgctttgggcaccacagctgggacctctctgcccaactctgttctccttctgagggggatggtgcctgtctctgccaccttcttttccactacagatcatggagagtcttgctgaagaaccttccttaggggaaacaggcatgtctgtcttggatcttttttttaaaaaacaacaacaacaacaaaaaaaaacgggtctcactctgttgccagactggagtgcagtggcacaatctcagctcactgcaacctctgcctcccgggttcaagcaattctcctgcctcggcctcccgagtagctgggactacaggcatgtgccatcatgcccctctaattttttgtatttttagtagagacagggtttcaccatgttggtcaggctggtctcaaactcctgacctcaaacaatccacctgcctcagcctcccaaagtgctgggattacaggcgtgagccaccgcgcccggcctgtcttggatctttagagttcatctccatccccgaagggagttgtagaagcttcctgtatcatgggccccacttgcctgtcccacactgtgagaggaaacccatttacatctcatgtccaaagccatttttttcctacaaatagttttgtgtgtgtgtgtgtgtattgaggggttataaaggaaagcagaatattttatcatggtttttgcttcagtggctttaggacaaattagaactcaactctggtgctagaaaagaaaaatctccacttaaaacccatgttcaaatatctgtaatgttcatttggagaagagaggaaggatttgggctttttaatactaattgtacctgaaggtttccctgcggaagcagtttattaaatgggactgaaagccgcgctgctaaaggcaattaacatctgatacattctcaaagctcagaaatctttggtgagaggaatgtttctgcctgtgtaagagcaggccagggagttaccttctgcttatggaaggaattcgtcctgggggggcttttatgattgttggattttgtcatctgtgtcacctgatcactcaacagttttttgcccaaacccacctatggctgggccctgcttgtccaagttgccctggatgagcacctggggccttgtcttgagggggaaaattgcctctgggcggctggtgcccctgcccttgagggggaccagatttcactgtgtattcaactttgaaaaagccagagcccttgaaaatgtctctcaggaccaatattgggccttgactgcagctgtgtctggggatgctggggagccttggggtcccaagacagactttgtgtctcagcagggcagtagcgctacctgtgtgtgagcctcttgtctagagggcagcagttccaattctggtgtcacaggcgcatgtggacagccaggggcctgatctcagtggctctgactcatgggtctgggattgagctgagaaccccgcactttagagaaactccctgatgatccccagtattcggcacaggccacctacaagtcacacactgagagcttctgtcctggcggcgggggtggtgggggaggctcctctgtcttgggtcagcttctctggtttttggtttgtcgcctctctctagctgtctcacttcctttctctgccctgcccttgactggtgaatccactggggcaaagctgtgttacctctctttgtcccactggagtgaccatgttcctgttgaattgtcaccacatacatttccactggccctcttcagcccattcatcaaaaccaataccaggggcagtgggagtgaggggaaagttttttctgtaatctgtaatctgtcaatctgtttaaaaaaaaaaaaaaaagtgtgtcagtataattccatgcagaacccagggtactgaccctgagtggcagacacaagtattccaaggagcatcaaccttcataaatatttatacgttctttgccagcacttaacatggaattataaggaaatttaagcatggcctgagagtatctgtaggaagaaaaacaggagagttgaattcctccttttcctctctctggccctgatccttacttaatgacaaaaatgccagtgtctggcgctaaaagaaatagctgttcttccagagaaggttctctttgttgagcattgagagagtcaaatcaacagcaggttcacagaaacccagaactgctggtgaagttagaagcaaagccctttgactatgtcatcttggttccatccagcagaaaaagaaactggaaatccagacatgaagtggtggtctctgcctgtgttctgccagcaattcttcaacaccaattaagtgtcttgcaattcaatccaattctttttttttcttttttttttttttttgagacagggtcttgctttctcgcccaggctggagtatggtggcataatcagggctcattgcagcttcaatctccagggatcaagcagtcctcccaccttagcctcccaaatagccgagaccacaggcacacaccactatgtccagctaattttatatcttgtagagacagggtctgtgttgcccaggctgatctcaaactcatgggttcaaacagtcttcccaccttagcctccaatagtgctgggattacaggcatgaggcgccacatctggcctcagttcaattctgatgccacctggagttagcacaggcccaagtgaaagggcaaggtccccaaggagactgctgtcatttcagacaccaggcacaagtgaggtccacagggcagccatgcttctgtctgtcttgcctacaaatttgggagttcacattaccgcccttcatgtttgataatttgctggaacaattcacagaactcaagaaagtgctatacttacaatcataggtttattataagaggtatgactcaggaccagccaaatgaagagactcttaggcaaggtcaaggggataggcatgggtggttggagcttccacacccttttgggtgcaccgtcctcttgaaacatcagtatgttcaccaacctggaagctccactgagcctcagtgtctggagtttttatgtggggtttaattgctctgcacaattgaatcattggtcacatgattgaactccatctccagccccccagaggccaggctaagccaaagttccaaccccctaatcctgtgcttggcttttttggtaactagcccccatcctgaagctaatgaggtcctagagagtgtgtggggttcaccgtgtacaatctagggcctcaggagcataacaaagacactcaggaaaatccaagggttgtcaaagcttggtgccaggaactggggacaaagaccagagatatatttattattttcacactgcccatgtctgcttgacctgggaaagaaagttgtttgtagaaatctttgctttttacatgaccaaatgatgccaagatggtcttcatggagattttggtccctagcacgagacggtattttggaggaagcttacttcacaagcagaatgaggttggatggggaaaatcccaggctaagactgtaagttgtgtgatcatgcagtttatcatctaatctaacccaggacacctttaggagcgcagggcgttaggaccttggggtcttcaggagactcccctgctgcacccagctggcaggagaggaaagagtgagtggaaggctgatggggtagggggcaggtggttaggagggccaggcctggcagcaccacacatcccttcttccccacattcatgggcagaatccaggcacatggccacagctaactgcagtgggaaatgtcatctggctgtgtgctcaggaggttgatagaggatgtgggttgctaataaacacatcacagccgccacatggttgttcctggaataggtgaagcaggctgcttcctcagggccttcacattgtcattcccactctaggaaattctctcaccccagatggcctcatgcctcactcccaaggctcctcttttgcttagaagataccttaacagaaagacaaggccaggcgaggtggctcacgcctgtaatcccagcaccttgggaggctaaagcaggaagatcacttgagcccaggagttcaggaccagcctaggcaacacagagaaacaccatctatacaaagtatttaaagaattggccaggtgtgtgatgtacacccagctactcggaaggctgaggtgggagcatcacttgagcccaggagttggaggctgcagtgagccatgatcacaccactgcactccagcctgggcaatggagtgagaccctgtctcaaaaatttcttaaaaacccacaaaaacaaaaaaatccagacaagcttgtcaacgctatgtgagatagcacacttgccaccctgtactctctatgccctaactattgaataataatttagctagtccgggtttttactagtcagaattttccagagagacagaatcaataggatatatggagatatatatatatataggaggagatttattatgggaattgactcaggcaattacggaggccaagaagtcacatgagctgctgtctgcaagctggagaaccaggaaagctggtggtgtaattcagtcttgagtccaaaggcttgagaaccaggtgagccagtggtgtaagtcctagttggaagtcaaagccctgagtactggggagggctgctggtataagtcctgaagtgcaaagccctgggaactgggagctctgatgtcccagggcaagagaagacaatgacccagctcgataaaagagaatttgcccttcctctgtctttttgttctctctgggccctgaaccgaggagatgatacctatccgtgttggtgagggcaggtctattttactcagtctactgactcaaatacttatttcttccagaaataccttcacagatacaccccaaaataatgtcttaacagttgccagactcagtagcttacacctataatctcagcactttgggaggccaaggcaggaggcttgcttgaggctaggagttcaagaccagcctcggcaacatagcaagtccccatctctgcattaaaagttagcttgtggtggcccgttcttgtagtcccagctgcttgggaggctgagtgggaggattgcttgagcccaggaggtcaagtctgcagtgagccatgattgtgccactgtgctccagcttgcgtgacagagcaaaaccccattgcagaaaaaaaagttttatcagctacttgggcattccatagtccaatcaagttgacacaaaattaactatcacagtgctctagattgcatgcagtagaagcagactgtaatgagagagaaaagcgtaccagggaacttacccaatcaacaaaaaggctggagacttaattcaggaaatcaaggctcagatctagtcatggaacaatgtgctttggatccctccaatgtggtcatcaccctagacactggctgccgtactacccattcttgatgtcacctttgagtcactccctcaggttatacactgcagggtggagacatttgattggctttgatgaagtcatgagtccgtacttcagatgctaggggacaaagaggggagctatctgtcgtgggaaatggggctctgagtcccacctatctaggcattcccccacatgcgaagtgttgccaaaagctgggtagcaaaagcagtaaatatccactacagctgggtatggcattctaggtttgatggcatcattttcatattatttaattttttaatgtgtatttttgttaagtttgctatccattttgtgtttcttagtaattttctttttatctctggattacttttaagaatttatgtgtttgatataatttcactacatgtggctagataagaatttatctgatcctcttggaactctttgggccttttcaacttaaagatgtttgcctttctttagttgtagaaaattcccagtcattatgtcttcaaatactactactccctattactgccttccgaaattcctattagaaatttgttggacttttcattctctcttccatgtctctttacaaagagacagtcatgtattttggccatttgattctgtgctatatttgaagagatttcaaatatactgttgaattctttaattctgtcttcagttatgtgtaatttgatgattatctgtttaatgtataactaatctgttaagtaatctgtttaatctgttaattagacaactaatgtttaacctgtttaatctgatctttagttatatctaatctgatttcattgttattttcaatggttatggtttttataaagttctatttgactctttttacatctacctgttcttttttcatgttttttccccataattttgttttaaggtttctagtccttcttttcttccttccattattttaggtattcttccttttttttcctctagtttttgtttttagttttgttattgttttgttttgttttggtattcttcctttagagcttagttcagatgactcttatccacagtctctggggtcctctgggtcttcccttgcattccagccatcctcttgagagactttgtgtggctgattcatttttgttcaggggttcttttcagtaggaagtttctgtcttatggtgatagttggttgattgtttttactgagagagtccttgtcctgcattgtgaaaatttccctccagggcttctctggggtccttaaagttaaaggcagggtggttctgttgggtaacataggcaggtggagaggataaataaatttagaattataaaccacctaaaaaagttgccccatctcttctcccagtataggccactggcctgagtcactgtctcttttccttaaaaaatcatgaaatctggtggggcatggtggctcacacctgtaatctcagcactctgggaggctgagatgggcagatcacttaaggtcagtagttcgagaccagcctggccaatgtgttgaaaccccatctctactaaaaatacaaaaaattagctgggcatggtggctcgcgcctgtagtcccagctactcgggagactgaggcaggagaatcgcttgaacccaggaggcagaggttgcagtgagccgagctcgtgccattgcacttcagtctgggtaacagagcaagactctgtctcaaaagaaaaaaaaaaaaattaatgaaatctgcacgctctctcctgcttcagagccaggaagactgggagttagaagttagaaaatcaagttcaaacaggctttcaacaattaggtgacttactggcttatgtagttgaaaagggaagggatagcctgcaaatgacctaggctcttacacccactgacatcccacattagatgacctttctctaaagccttctccttgccttttctctctccgtcgtttctcgaactctccaacacaactccagatggattaatcctttcgaatcacagcgggaaatgctgctctgcagctcagaaccctgcaaaggctcactttgtgcctctggtgggaagtccgaagcattgtggttggcagcctaggccattcatttctccagctttatctcatccgaccctgcttgacacatccttaaatccattccagcagaactcctctctcttcctctcactcccactctgaactgtcccttctctgaagggacatttgcctatggcccttgcctgtgtgatatttgcctatggcctttgcccgtagcatccatgttctggtttgtattggagttatttgtgtgtctgttttacaccaccccttcattcactgagttcttggagggaggaaagccatgtctgacttaccgtctattggccgtggtgccaggcagaaggcatgtcacgtaagagtcgctccagtgggcctcagtgaattggggcacccccagtgctcttgctggtgattcagttaagccaggctagtggcccctgtgctgcacagggtgggtacatgcacttcagcagagtctcctgaggaacccctggcttagtgttattgcatcagcacacaagagctcaaccctggcagtgaggtgggagtacagccagagagagcattgcccctgcgtggtgtctccctctcccccgttcctgggcctcctggtttggccccactccaccattactcttccttcaggatactcttctggcccggcagctgtcttgaaagcccctgtgcagtttcaaaatgctccctgtttggactgcagcaaatcctgcctagtagcgttgtctgatcatgtgaatgtgatgccttcccggtctggcgcctctggggtgtactgggcaagtcggcccacgcctccataggccttgcatgcagcagggctcacaacacacctctgttgcttaagggtgtccattcaagtcaccctgctcccagtactgaccccagggtagacaaaacggattccgtaagacattcaagccaacagtcaggaacctgatgtagctgttgggtgaccatacttgtatctaggaggctatcctgagcctagcacagagcctggcatgtggtaaactctctatgaaggaattaatgagttgatgggtgcatcttttgatgggtgcatcttttgatctcctccaacagattacaacagcagtgaattgaaaacagcctgcaggaagcatgagctgtatgtgagtttccaagacctgggatggcaggtgagttctctggacacgggggataaaggtcctttctcagcagtttactctcatctgaatggtggcagccattaccaaacacccagagcttgattgaaggctgagctgcttccttctgtggaagtcctgaggagccctcccaaatgctcaggctcctggagtaaggcagaggaagcttagtctgtggggcaccaggcgctccaacaccttcctagggtgcctgagctctgtgatccctcaaaaatcaatagccacatttcccaatattctcacctcatcctttcaaagcccataggacatacatttatttgggcatttaaacaaattttaattgagacagggttggaaaaaaattacctaatggttaacatctccaatggctgcaaaccagctcaccaaacgatgcagaagagcacacgtttgcctcgtacctgagaaccatcactagtttgtaagaaaggcagcaactttaatcacaggtggtgagcgataaaaggtagcttccatatgcaggtggcactacttccgcaggagcaccgtgggctcctggagaggcttgcttgggtccaagcacatattgctggcaacctacgtgcttccaggtagcagctgaggccctgtgggcctctgcaaggagcgagggttctggggtcagatggaccaggttcacttcccagcattgccacttgaatgtgaacttggacaaattcctaagccttcctgcgtctgtatccttgcctgtgcaatgtgaaaaataccttttcacagcattcctgaaaagcacaaatagtgtgagaagtgcatgctcatcttttgttgcttcctttgcatgaaattaaggactggatcattgcacccaagggctatgctgccaattactgtgatggagaatgctccttcccactcaacgcacacatgaatgcaaccaaccacgcgattgtgcagaccttggtgagctctcggagactttgttttgtaagtgggagtaagccaagaccaggtgtcatttctaaggtaccttctccccttctgttttggaacaggttcaccttatgaaccccgagtatgtccccaaaccgtgctgtgcgccaactaagctaaatgccatctcggttctttactttgatgacaactccaatgtcattctgaaaaaatacaggaatatggttgtaagagcttgtggatgccactaactcgaaaccagatgctggggacacacattctgccttggattcctagattacatctgccttaaaaaaacacggaagcacagttggaggtgggacgatgagactttgaaactatctcatgccagtgccttattacccaggaagattttaaaggacctcattaataatttgctcacttggtaaatgacgtgagtagttgttggtctgtagcaagctgagtttggatgtctgtagcataaggtctggtaactgcagaaacataaccgtgaagctcttcctaccctcctcccccaaaaacccaccaaaattagttttagctgtagatcaagctatttggggtgtttgttagtaaatagggaaaataatctcaaaggagttaaatgtattcttggctaaaggatcagctggttcagtactgtctatcaaaggtagattttacagagaacagaaatcggggaagtggggggaacgcctctgttcagttcattcccagaagtccacaggacgcacagcccaggccacagccagggctccacggggcgcccttgtctcagtcattgctgttgtatgttcgtgctggagttttgttggtgtgaaaatacacttatttcagccaaaacataccatttctacacctcaatcctccatttgctgtactctttgctagtaccaaaagtagactgattacactgaggtgaggctacaaggggtgtgtaaccgtgtaacacgtgaaggcaatgctcacctcttctttaccagaacggttctttgaccagcacattaacttctggactgccggctctagtaccttttcagtaaagtggttctctgcctttttactatacagcataccacgccacagggttagaaccaacgaagaaaataaaatgagggtgcccagcttataagaatggtgttagggggatgagcatgctgtttatgaacggaaatcatgatttcccttgtagaaagtgaggctcagattaaattttagaatattttctaaatgtctttttcacaatcatgtactgggaaggcaatttcatactaaactgattaaataatacatttataatctacaactgtttgcacttacagctttttttgtaaatataaactataatttattgtctattttatatctgttttgctgtaacattgaaggaaagaccagacttttaaaaaaaaagagtttatttagaaagtatcatagtgtaaacaaacaaattgtaccactttgattttcttggaatacaagactcgtgatgcaaagctgaagttgtgtgtacaagactcttgacagttgtgcttctctaggaggttgggtttttttaaaaaaagaattatctgtgaaccatacgtgattaataaagatttcctttaaggca

SEQ ID NO: 112 - DNA, 12878 bp, Homo sapiens
agtttgcaaaagccagaggtgcaagaagcagcgactgcagcagcagcagcagcagcggcggtggcagcagcagcagcagcggcggcagcagcagcagcagcggaggcaccggtggcagcagcagcatcaccagcaacaacaacaaaaaaaaatcctcatcaaatcctcacctaagctttcagtgtatccagatccacatcttcactcaagccaggagagggaaagaggaaaggggggcaggaaaaaaaaaaaacccaacaacttagcggaaacttctcagagaatgctccaaaactcagcagtgcttctggtgctggtgatcagtgcttctgcaacccatgaggcggagcagaatgactctgtgagccccaggaaatcccgagtggcggctcaaaactcaggtaagcagcaaacccaagagcggtttctcccccaaagagctgtcctcatttgcctctcccttttgcaactgtgtctgtgacggctgatcttgataataaatgtgcttcatgcctgatggcaataaactgccagtgtaatccaatagccttaggcagtggagctcctttgtttaataaattgcatgcaactaaacgaagaagctggacgctctgctgagggtatttcattgcataagcctagcctgattgcctgaaatctggcacgtaccctcttggagggggaggggtgagaggggaggaaaggcttgaatgttggcatgcttcaaagcgctctctatactttccagaagctgatctaaggtaagacctggcttgtttgatgctgtccctcttcctttcctcttaagactctacctcttcacttcttgacttctctacctaagagaatacacagaaaagctccctcttcagactgattttcagaaccatagccctcaagtctgacaaatccagggcggattcagagaaaaccctatacatcccacccccaaccctgctgcctgtctccctcctggctctgtagggctccattcagtcgtccctgcagcccgtagccagagagcccctagaaaaaaaaaattgtgaaacgtagcagctgtttctccaagggtaaggtctcactttcgtcttgactcttggagcagttaattgtgcattatcttggcttctgaaggaaaagaatcattaggaagcctgcattgacacctctgcctcttgacttctctggctccacttgttccccttccaatactgccctctgtcctccaactgtcagcaaagaccggatcacaggtgtcaaaatgctgcagatgatgatccccttggaagagcacaggtccctgccgagaggagggcttttgcttcacttccttttgtacttagttgctatagagatgcagtgattcacaattcgagcttgcctaaaacaatagcagccctaatgcatattaaaactgcttaaagcaaagttataatttaaacccgtggaaatatataattagggaaatgacttgtaacatcctagaggctgcgggtggtgggagggggtggggaagactaactgaaccatgcttttgatctcagaggagaatcctatggcatgaaggctgcagatcattccttgcctagctgcctgccagaacaccccccttctgtgggagaaaaattacttttatgggagatcttatccagaatgtagaaagcctcatgcaagttttttgcggttttcttccagtcttgcatagggaggccttggcctggttattccacacctgtgtttcttctttctttctttctttctttctttcttttttaaaaggcttttaatatgaaagagattatgcatacctctaagcactgtcctagtggagggttggggtgaaacatgaacggatcagatttctttttgccaatatgacggtaagttaaaagcctgaaatcagaagggtctccaagtggactcctggcacagtcttctctgccatttagactaaaatcccatgctttttactcgggagtgcatttttccaaagctagatggattccctggcccttttacctcttaaacctgaccactagccactgtctccttccttcccatgctttcaagtgctaagcaatgacctttgattctatggaatggcttaaaggcactgtgcatttccagacttgagcctcacttctccagacaccaaaattgtaggtaatggtgaaacagggagcgtgtgtctgaaacagagaactccctccctgtccatcatgtactccagcaatcataaacaaaaggagcctgtctatcctctctttctcaatcaaatgggtctatcaattgcccctcatgacagattcctaggataagttcttctgacctcatgtccttgaaattcacctctgcacccacttgatcccacccagccattcctcactgtttgacccagaatggatggatttgtctctttcagctgaagtggttcgttgcctcaacagtgctctacaggtcggctgcggggcttttgcatgcctggaaaactccacctgtgacacagatgggatgtatgacatctgtaaatccttcttgtacagcgctgctaaatttgacactcaggtaataaaaccttgacccctgctcccactggctgcttgtctttaacagtgtgttagaccatggttcttaggaaccagtcttgtagggaaccagccctgcttctcagcttccccactctaaattcccatctcagcatgtgtatgcacaagtgtgtgcatgcacacacacacacacacacacacacagaggcactcatctggccaggaaataggttctgtataagacacgccccactcactctaatgcatgattctaaggagctagtagaggctgtcttataaggccaggggtaataagccaaaaagattttcctctgtaagaggacataaaaacgtgcatagagcaaggaagttctctctgcatgacctagcatactagcttttgatctgaattctcaaagtctcaatctcaagaatatgaagtcagattacgactatttttaagctgcagaatggttgatcacggttcatcttttttttctgtaatttcatttcggtagagcttaattctcaagggaatccagggagatggggagagggcttttttttttttcaatccttagccgagacatgcaatcttctcattgcaaggatatgcagatggccatgatacgttgcccagatgagcccccttaaattcctccatgtatatgcccatcctctttgtcaggtcaagctaaagacctccctcttgtccttcctccatggcagggaaaagcattcgtcaaagagagcttaaaatgcatcgccaacggggtcacctccaaggtcttcctcgccattcggaggtgctccactttccaaaggatgattgctgaggtgcaggaagagtgctacagcaagctgaatgtgtgcagcatcgccaagcggaaccctgaagccatcactgaggtcgtccagctgcccaatcacttctccaacaggtacaaactgagtctactttttcacaatcaggggactgggagcaggtggctggctggcagagccagactgggagggagggttaaattgccacagtcatgctcttattttagcttgcagtcttcccagcttttgcaggaaaaaaatatgtttgtgattggttgtgacagtttaagcagcttgggcttttttttccctactgttataggaaaagtcttttcatgcagctcatagaaagccagcctcatctgcagcatccctgggtgctttcattgaccattttttgccataagcctgaagggaatggtgaagtttctggaaacaagcttttaagacatcagatttggctgaaaccatgaccgtgcaacaacacaattggccatgattaaaaaaaaaaaaaaaaaaaaaagccctctggttaaatgtcataatgcagattttaagtctccatctatttcaaatcagtcccaaacacagtcagagatttcactgggtagcccagagcaagccatctcacttccctggggctcagatttcctttgtaaaaagcaaaatggctggactggaccattttcaggtttccttccaggccttatgttatcccattcctctagcccaagatttcctagaatgagtgtgttttatggctgtccagatcccattctcatcttagtattcaaacaccacccaaggccactgagctagtacagtaacatctgggcattgtacttttcagtgtttttaccagccaggagtgaattcctgttacatgagacagctggcatcctcagttcatgtgcgtggcctggaaaggttcccagcaagaactaagagatgccaatggggttggcgtggaggtctggcaggggcagtgcagaccggtcaagtttagccccctgtgatatccctcagcctaaaaacttgactcccagccttgaatttctatgattctttgactctccactcaaatctgcacatatccacaatgatcagtgctttgcatgttactctgaccacctgagagttatcacaggcttatctgattaatttcctagccaggtgccaccacccttcttaagacagtggcaacagccaagtccctctggggcttacaagtgatttagtcatgtacatacatgcaacaaaaaagtagttcctccttagggaaaggctaaggtgcctaacacaaacgctgtgtaaaatttctttttcacccttaactacaggtgagtgcccttcagaaccacaaatcaatttgtaaaaatcacttctctagtccttggaagtgactttatcatggggttctaaatggtttcctcagaacagaaaaatccaaccattttctcaagtgggctgtctctatataactcttggttttaaatttcccctaggaagattcttattgcacagaggaaacaggtgcagagggtggggaggggagatctgattaattattggagacttccttcaccattaggaaaagaaatgaagaattcttagccagacaggggctaaggacaaagtatgtgtttgtgtggtagttaggggtggggggagaggtacattagcaaagccactattacaatttagatccttaaggattctgtgacaaatcatgatctataatacggcatatttccaattttgaggcgatactaatctccctatttcatctgaagtagcatcttccattagaaaggcagagaggtctttaggcagaactatatagctactcgactagaggtcccaatttatctaagaagagactagtaaatttttaaccaggctattatttcttctaatcagtgccttattttcaacacctttagaaaatggtcacaaagaaagtcttcttatctccctctttcatcttagggactcattaggaaaggtcaattggagaaaaaaaaaatgtggccagcccttgaaaaccggaatcttccatgcaacctttctccaaaaatttcactttaacaggctatattattcctgctcaggattgtagaaatgtccggttccatgctgggcttgctttgctccattgaagctgctcaccttcctgagacatcctgctttcccagcctctatcccaccatagacacacgctaagtcagtgccaattggcacagaattgcaagaggaagtagttacaggttcattccaccttcctgtgacttatctagcatgagatttggggctgggagaatccaaaagcctgtgactggaccaggagccagaacaaggggattttccatgacagaaatgcacctagagggtaaagaggtagctggagtttccacctgcctgaatttgcagactatgctttcaaccctgtgggaagcaggcaaaattgatcaggccagcagggcggtgcgaggcttgggaaccacttagaccaacccagatccagagtgggaaaactgacaaagcttccaactctctagggcatggatagggaacaggaaacagaagaataatattgatcaagggaaacaaaggactatttataaaccctcacacagaacgttcctaggcagtatgtgtgtatttgggtaagcatggctgaaacagtagctatggagaatatctgatcttattctttatcaaaaaaaaaaaggtcagggatggaattttcaaagtgagaaaaaagaaacataattaaaaaggtcctttcgggctgggtgatcagaacacttagtccaccaagtctttccaacacatctcctccatcctccataaagataaagaaaggaatcttcttcttctttttttttttttttttttttttttttgacagagtatcgctctgttgcccaggctggagtacagtggtgagatctcagttcactgcaacctccatctcctgggttcaagcaattctcctgcctcagcctccagagtagctgggattacaagcactcaccaccacgcccagctaatttttgtatttttagtagagacagggtttcatcatgttggccgggctggtcttgaactcctgacctcaggtgatccacccatcttggcctcccaaagtgctgggactgcaggcatgagccaccatgcccagccaagaaaggaatcttcttaagcagtcctaactaccactgcaaaggaggggatgtaagcagagctgctctattttttgtaaaattgagaagaaaaatgtgtattgaatccctagaaacatagaatgtcatagttggagatgactgctgaggttaactagactaactgcctcattttactgattaaagaataaaggctcagagagtggagtgacctgctgaaggtcacacagcttgtgaataactaagttgggcttagaactcatgtggccttgagccaagctatttgatttctacttcaaaaatggcagccagcaaaatctgcaggaaatagccacaacccaaaaatagaataccaagcacaattgaatatatgtgcaccgtggtagtccacaattaaatttgcgtcctttctctcccaaaaggatggacacatcctaccaatagctataggaactataagaccatagcacaagaaggtgctcactaaataggtgacgattgctaagtcaactcttgctggagacacaacctcttaaataatccatctcacttagtgacacaggaaagggctatgtcattggcaagcatgatcccagaggtaaatggctattccagcccttactggacaggcactggttaacctattgctcatactgagaaactggtgacatcaaataatcctgacaaattttccagcctttgaagaactactaatggagacatggactttgttttatattctaaagagctttctcagcctgcccttgctgagttaacaaaagccccatgagggaaatagggtagattccagtgggggtgggtggttctcactaagagccctcaggctggcaagggtcactgtcaagaaacaccaaggtcaggtgtcatatctgagccagcagacaaagcaacagtaaaggtagaaaggtagaaaccctccaaaaaagagcaggcactctgacaaagtggggcctgaaggaaatgtatggccctgaagctgcaaagctggctgcagaagcttaattaccttaagggtactagacttctttgtccagacaagagctttcaagtccttctaaggaagaactagcatttctttttatccctttctagggaaagattgtattttccagcctatctggggactcatctggcatgaacagctctttctagaaatggaagggttaacttctaagttataaagtccttattggagggatgggagatcagaaaccacccaccaggatctaatcaccctctgaaatagacacagccatccaaagacccaggtcctagcagagcccaagagccaggtgatgcctggagatctatatgggtgtgtagatgtcagaagctgctggtgcaaagttgtttattctatgtttctccaaaactggttttctcctcatttccccatccaaaggagatctcctttgactcatgtgctttgtaattccaaagagttggacaatgttcctctgtgccagagagtcccagttttgaccacagctggatataattctccctggagggaagggtttcaccaggcctgtgtcagcaaccaagacactgcacttgcctctcagtccccagcttccttctgctgtgccacagaagggtgaccatatcacctcattacccacgttccatgctatttaccacacatctttgaaataacctctctgggggattaagttattctagaaagatgtttgatcctgtgcactgtttggtgagttaaaaataaacaggtttcttttcacggaagacctggtggccccagagatccttgggctcctctgagaaaaagttctctccatgtaaatactgcaggtcactgtcactgagtctcttattagcgaacacagaggtaatgggttttgacaactcaactgcgactacaaaatggaccaaatgcatcccagtctaaattggataatacctgaactgtcttcccaaataacaggacaagtcattgatatgccctaaatattagacagtttaatcctttctgagccacaaagcttagctacattgcttgggggtatttaaagaattcgctgcaaagatgaaggtaactgataccaaacacaaggggttttggtaaaatttactaaaactacagataagttttcttctgggaatcactacttattggagagaattatattcttaaaactccatttccttagtggctgcaaaataaatcaacaaatgtgcagtgatcaggcaatgtagcacgatggcaccgggccataaggaatacaaagaaggacacaaatcctgccttcagtaagcttacagtctagtcagcgaaagaaagccatcacaaaaccatcaaatgctggcctatgtgatggcaaacaaagatctataaatatccaaaaagggaagaggttagcaaactctggtatagtagaagaaggattcatgaattatagtagcatgaacccttaaaaaccaccaatatttccatttaaatagacttcttgcctaggatttggccttctgactacaatatacctttgaaggagggctgaagatggagtcagtcaatatcttttatcagggctgtccaagtatgtgataagggcattagattttgtagaaaaatgcatggcacacagaagagggggccttagacagaagtttcatcagaagatgcacagatctgcatacacacacacacacacacacctgtgcccacacaccaccaaaaaaaggaaaattacaaaaaagcatcaaaataattacacatgcatgtacaatggctactaatctcagtgatgagcattggactcacttcattctaatttgcttcacctcatccaccttagtttcttctctacaaaatgagagttgaactagtcaccaaatggtctctgtggtcccagctagctctgtaattctgtttctaaaaatgtcagtcaccacagtcagcctgctcttcaaagtgtgatctaaatctcctcaactctaaacatgaagatctgtcttgcattgtgtggtaaaccctaggagcagatgcattgaaactagggtgacatggcacaagggttagagagcaaaagccaccttcagctgatgaactattgatgtttgcatggtcaggccattagggactcgtgttggctagagcccgggtgaaagcctgggtctcgccgggctctcactgggtgaccaccatatgcactctctttcttgatgcagatactataacagacttgtccgaagcctgctggaatgtgatgaagacacagtcagcacaatcagagacagcctgatggagaaaattgggcctaacatggccagcctcttccacatcctgcagacagaccactgtgcccaaacacacccacgagctgacttcaacaggagacgcaccaatgagccgcagaagctgaaagtcctcctcaggaacctccgaggtgaggaggactctccctcccacatcaaacgcacatcccatgagagtgcataaccagggagaggttattcacaacctcaccaaactagtatcattttaggggtgttgacacaccagttttgagtgtactgtgcctggtttgatttttttaaagtagttcctattttctatcccccttaaagaaaattgcatgaaactaggcttctgtaatcaatatcccaacattctgcaatggcagcattcccaccaacaaaatccatgtgaccattctgcctctcctcaggagaaagtaccctcttttaccaacttcctctgccatgtttttcccctgctcccctgagaccacccccaaacacaaaacattcatgtaactctccagccattgtaatttgaagatgtggatccctttagaacggttgccccagtagagttagctgataaggaaactttatttaaatgcatgtcttaaatgctcataaagatgttaaatggaattcgtgttatgaatctgtgctggccatggacgaatatgaatgtcacatttgaattcttgatctctaatgagctagtgtcttatggtcttgatcctccaatgtctaattttctttccgacacatttaccaaattgcttgagcctggctgtccaaccagactttgagcctgcatcttcttgcatctaatgaaaaacaaaaagctaacatctttacgtactgtaactgctcagagctttaaaagtatctttaacaattgtcttaaaaccagagaatcttaaggtctaactgtggaatataaatagctgaaaactaatgtactgtacataaattccagaggactctgcttaaacaaagcagtatataataactttattgcatatagatttagttttgtaacttagctttatttttcttttcctgggaatggaataactatctcacttccagatatccacataaatgctccttgtggccttttttataactaagggggtagaagtagttttaattcaacatcaaaacttaagatgggcctgtatgagacaggaaaaaccaacaggtttatctgaaggaccccaggtaagatgttaatctcccagcccacctcaacccagaggctactcttgacttagacctatactgaaagatctctgtcacatccaactggaaattccaggaaccaaaaagagcatccctatgggcttggaccacttacagtgtgataaggcctactatacattaggaagtggcagttctttactcgtcccctttcatcggtgcctggtactctggcaaatgatgatggggtgggagactttccattaaatcaatcaggaatgagtcaatcagcctttaggtctttagtccgggggacttggggctgagagagtataaataaccctgggctgtccagccttaatagacttctcttacattttcgtcctgtagcacgctgcctgccaaagtagtcctggcagctggaccatctctgtaggatcgtaaaaaaatagaaaaaaagaaaaaaaaaagaaagaaagagggaaaaagagctggtggtttgatcatttctgccatgatgtttacaagatggcgaccaccaaagtcaaacgactaacctatctatgaacaacagtagtttctcagggtcactgtccttgaacccaacagtcccttatgagcgtcactgcccaccaaaggtcaatgtcaagagaggaagagagggaggaggggtaggactgcaggggccactccaaactcgcttaggtagaaactattggtgcttgactctcactaggctaaactcaagatttgaccaaatcgagtgatagggatcctggtgggaggagagagggcacatctccagaaaaatgaaaagcaatacaactttaccataaagcctttaaaaccagtaacgtgctgctcaaggaccaagagcaattgcagcagacccagcagcagcagcagcagcacaaacattgctgcctttgtccccacacagcctctaagcgtgctgacatcagattgttaagggcatttttatactcagaactgtcccatccccaggtccccaaacttatggacactgccttagcctcttggaaatcaggtagaccatattctaagttagactcttcccctccctcccacacttcccacccccaggcaaggctgacttctctgaatcagaaaagctattaaagtttgtgtgttgtgtccattttgcaaacccaactaagccaggaccccaatgcgacaagtagttcatgagtattcctagcaaatttctctctttcttcagttcagtagatttccttttttcttttctttttttttttttttttttttggctgtgacctcttcaaaccgtggtacccccccttttctccccacgatgatatctatatatgtatctacaatacatatatctacacatacagaaagaagcagttctcacaatgttgctagttttttgcttctctttcccccaccctactccctccaattcccccttaaacttccaaagcttcgtcttgtgtttgctgcagagtgattcgggggctgacctagaccagtttgcatgattcttctcttgtgatttggttgcactttagacatttttgtgccattatatttgcattatgtatttataatttaaatgatatttaggtttttggctgagtactggaataaacagtgagcatatctggtatatgtcattatttattgttaaattacatttttaagctccatgtgcatataaaggttatgaaacatatcatggtaatgacagatgcaagttattttatttgcttatttttataattaaagatgccatagcataatatgaagcctttggtgaattccttctaagataaaaataataataaagtgttacgtttta

SEQ ID NO: 113 - DNA, 46426 bp, Homo sapiens
tccggcccgcacccacccccaagaggggccttcagctttggggctcagaggcacgacctcctggggagggttaaaaggcagacgcccccccgccccccgcgcccccgcgccccgactccttcgccgcctccagcctctcgccagtgggaagcggggagcagccgcgcggccggagtccggaggcgaggggaggtcggccgcaacttccccggtccaccttaagaggacgatgtagccagctcgcagcgctgaccttagaaaaacaagtttgcgcaaagtggagcggggacccggcctctgggcagccccggcggcgcttccagtgccttccagccctcgcgggcggcgcaggtccgggcccggcagggacggggaggggcagagcgggaccggtcggggctggggaccagccgcgcgggcttctgaacgggcacgctgtcggagccggaggctcgtctagtcccgagccccagcgggccgcggcggctcgcggggccgccttcccgggacagcagccggggcccgggcgccggcgcgggggaggacgctgccctccccggccgggcgcgcagctcgcagccctcgctccctcccccggggcgcgcaggcgggcgctcgctcgcagagaaggtgccggcggggccggagccccgaagcctccccgggcggcgggaagacgggaggaggggaaagggaaggagggagggggtcgggctgccgggagggcgggggcagcggccgggactgcgggccgggagcgagcccagccgcccgcgccgtgtggagcccgggcggggcaggtgggcagcggcgggggcggctccgcgcggccgggctcggccgtgctgcccctcgcccctgctcgcgcggtcctctctcccgcgcggtctgtcggtctgcgcgccgcctcgctcctcgctcctcgctctccccctctttctccccctctcgcctctccgtgtctctggctctctgcctggctcccttgggtctgtttctctctcctgccgcctctctctggccgcccctggctttatttctcgcgcgcttggggtctctcccagtctccgtctctccatttctcctggggggcggggagggggggtctccaaaaaccgcggcggcggcggcggccgctccaggcgcccgttccggagtcggggggaggcccagccgggaggggggaagggggggagccttagtcatttccccgctccagcctgctcccgcccgagcgcgcactcacggccgctctccctcctcgctccgcagccgcggcccatggagcccgccggcccggcccccggccgcctcgggccgctgctctgcctgctgctcgccgcgtcctgcgcctggtcaggtaagcacccccccgctccccaccgctgcactccccaaactgcgggctcaggcctctcagactggcactgggaccccttcggctaatgccgagcagtaatagggggagagacgcctgtaaccagggttatagatgcagaaactgaggcccagagagggccagcgacatgcccaaggtcacacagccaagggtagaacccaagtctcttctatgagagtttgtctctgtggactctgactctgtgcactgtgctgggcactgagacaaaagagccgagttgcttcactcagcccctgcccggtccaatggggaaggctgactgacagtggctttcagagcagggccgtccggcttccccagaatctgtccccatggacatacgactttccacatgtttgacttcagggtgtgaggggaggaggtgagggcagaggtcctcccgatgctgcctggaatggaacagagacaagctgttgcaattagggaagagtgagccctccctctggtgcgcagagtaaaccggtgttagtgtgtgcctgggagagagggagccgggaggccgcggtaaccccagagcgagctgctgcgagcaacagatccttatgtaaaaacacggtggattgtccctgtggttgccaaagcctctccctggtggtcttgctccttgaggcgctcccagctcccccttcctcctgccttccccgagcttccaggcagctccctgcagttcaggtgctccgcggggatgttacctgtggctctgaccatgtctttctgttggcctacatcaaacacctggctgtcgccggcaggcgggctctgaaggctactgtgcatgttcaccaaagggtgaggtcaccattcaggagtcttgcttcttaaatgggttttgcaaaaccatgggtctcctgggagggcaccgggtggggggcggggggagcagagaaatggcattaagggagttgggagggagagaaaaatggggatcttgttttttgtcgtcttgaaactgtgttgtaggcagtggggtctctctgtacctcccacccttgaggagggaggtaaagatgagctcagtgtccaacacccccttttgcgtttgactagagatggtaaccatctgatagcagggagaaagggagaactagcaaagagtgggtggaaggagaagtatggggggtagacagctgcttctctctgccctgcagtttcccctgaaacccaggaattcacataggcatccccccaccccaccccaccctccacccccagttcttttcagttatagttgcgtccttgctgggctgaagggagcactgatacagttcacgtctctccagtgagtggcatctcctatctgctccttcctgcctgagctggccatttgtaccctgcaaaagtccgagttcctgccctgccatccttcctggcctggaaatgcacaagtgtcactcacaagtgcttaattttcctgaagcagggaattgggcccgagttaatttctaaatgtctattccagacccttctccgaccaggaggctgtggttcagtccctggcaaacgagcagtgacgctgattagcaagtgctccgatgggcagcctgcctttcctggggcaccggctgggaacaccaacacctttcttgtgagcacatctcccccttttgcctataaaaacagtctataagatggtaaagattgggccataaaacttccgttccaatccattcagcatcaatagcctgaaaaagtgggagcagcagaggggccaagattagctttgaaataaataaatcttaggaggtaagaatgaatttcttggtcgagggtggtggggaagggatgaggtgcgaccatcatagctcaagtctcccattatccttcagtatctgttcttcggggtcctggtcacaccatgggcctgggcagggaagtcacctggtttggctgaaggatggggcctcaggcccctccccctattgctccagacatggaatttacaacaaagaagtagagagacaggatatgagggtaggaaggtacaaggaggcagttgtccaattttctaagaaaatggatttgttcgagtgagaaactaaaatgtcaggtttaggaaggcggctttggattgaatgactactagtgtctcaggcagaactgtcagcctgggaggtgtcacatgattcctgtgtcttcacatgatcactgttttgggggggtggggccaatcatgtgaattatcctgggtgggggaggcaagagaagaagtttctaaagattgcttttagcacaaatgctgccaaagggaaattctaaaaagatcccagtgaagtcaccaacctatgtttttggacccaatgtgaggcctgtttcctaaaacaactgcactgagggagattctgaggctgggagaagggcaagggactgaggcctggggacacctggcacctgattttgtgtcagcagggcctgacgctgaacccgcaggatgcctgcttggccccaggtaggccttgagacctctgagtcaccccccaggccgacctcagataaactcccattcatttcttctctctggcctggaggaggccaagccaagttgcagttcaggctctggggagcagcggggccccccagtgaacctctcaccgtttggtagagggtggcactctgggggctcctctgtactttcctaaatggtaaagttaatctcacttcctctttcgtaagaagagaaaacggggcgggagtgctttggctcaacacatcaggctgttggaagttcctttaaagccatagttttctctgagtactttctggcctttaccaacccctcggaaactcacggtaattcacgtctgtacttgcagtcatgcagcacctatgcagtgctggtgtgaaccatgtgttgagagaagggaggaaaaccaacattcattagatagttaatggcgttccaggccggatgctgctcctgcgtcgtctcacccgcaagacatggattggctcttctccccattctgcagatgcagaaaatcgagtcccaaactggggaactaacttataagtgatagagaggagccaggattttggatgctggccttcctgctgggtggcttctagggaagaagctcaatgacttaatcaggatgatttagtccaagctggagagggagtgagagaggcccctttctggccttgggtggaggactgtagaagagttctttctctgggcagaaggttttgatgaagtcacaggcatttctctgaaagcctgctgagggtggaaatactgacagccccttggtcctcaccagtaacaacacatgagaggtgatgtggctcctgtgagagccccccatctgggctgctgagctctggagcccccagagctggaatattcctccctgcatcttcctggtgccctttgcgacagatggagagggggtgtgcgagaggaagggagtctaaaagtgttgtacggatcccacacgcgctcgcttgctgcttccaatggctccgtgcgacaggttattttcttatttgtagtcttggactgacggaaggtttcccccctctctctctctttttaaatgtgctcagatttctggcctgtcaacacaactcagatcatgtcactccccagctcaaaactgttgagtgggtccaagttttctttaaaaaaaaaaaacaaaaaaacacaaagctgccgtgaggcctgggcttcctccctgccaggcctgatttccagccacatgttttccaacaagctgacctgttgagatgctgcaggataaccaggcttcctccctgcagaccagagctttgctggctactcagccacacgagcaccccaaagaccctgagaagccctgcaatgtagaatcccgagctgggtcacatttactccagtgttccctgaacttatgaacgagaggcatttgatttgtagtatgcccgttagcatgtggcctctctccgtttggtaaacggttttctacagatccatgccctcagctgaactctcagctctgtgccttggcccgtgctgttcctgccatcagaaatgccctccctgtacctccttgtcttcctgtgtctgaatcctactcatcctccgaggttcaatttaatgtgcctcctggggagaggtcagaggagcctctccacgcagacacacaccctggcctagcgctaagatggtgctaagacccctgggtgttgatctgagccctgctactgacttggacaatttgcaggaatctgtgtctcattttgctcatctgtaaaagaggaatggtattaaccactctattgcaaggattaagttaattaatgcgtgtataatgctggaagccatgccttgtatgtagtaagcactcaatacatattaaccagtgttgtaattagcatggctttattctggtttgattcctcttttttaacaattgggacggattttcataaaacatctaacacagttgcttacacatagggggtacttaaaaaacagcaaaggctgttcagtgaacaaatgtccttcagcttgatattttccttgtagctttttttttttcttttttttttttttgagatggagtttcactcttgttgcccaggctggagtgcaatggcgtgatctcggctcaacgcaacctccgcctcctgggttcaagcgattctcctgcctcagcctcccgagtagctgggattacagggatgcgccaccatgcctggctgattttgtatttttagtagagacaaggtttctccgtgttggtcaggctggtctcgaactcctgaccccaggtgatccacctcccaaagtgctgggattacaggctgagccaccgcaccacccagctgtccttgtagcttttatgctgttgggggatggacaagttgagtagaaacccaggctagagtgatttaattgcctgttactagggactgagtgctgtgggcacagcctgcctctaggtgtctctatctggatccacaggtctgcagttgtggattcccggacctgcaaagcagtagggggcctgagagagccctctgtgctttcatccagtgccttatggtgcggccagaagaacagagagaaaaaaactggccgggcccacgcgggagatccatggcaaggcccggctggaacgccaagcctcctgtggtccaggccaaggcttttaaaaactgggctgtgctggaactttccactgtttcagccagaaatctgacaggatcccgaattccccgggaaaacactaaagtaatactaataggaaccatctgggttctctgcttcctgggctcagcacttggtgtgtgtgaccctggtggtactcacagccacctggcgatgcacgtcgttatcttcggacccgttggatctgtgaggaaactgaggctctgaatggtgaagcagcttgcccaaggccacaccgtaagcgccagatgtggataaccactgtcggcctaatcacagagcctatgtggttaactgttgtgccattccttagccgtcactgaggcttgcttgacaggtagggaaactgaggcccagttgtgctggcaccctgctcccttagtgctcctctcatttttgtttttgttttttcttcctttctttctttctttttttttttttttttttttttttgagacggagtcttgctctgtcgcccaggctggagtgcagtggtgcgacctcggctcactgcagcctctgcctcctgggtccaagcaattctcctatctcagcctccccagtagctaggactacaggcgcacaccgtcacgcccagctaatttttgtgtttttagtagagactgggtttcaccatattgatcaggctggtctcaaactcctgacctcaggtgatcctcccgcctcggcctcccaaagtgctgggattacaggcgtgagccactgcacccggcctcctctcgtatttctatcagtgcaccttcctatgaggtgggggcagtgtgtgtccccaaggtgtgtccctgtccccatactagagaaggaagcatctattttcacagctgaaactgctttcctgttaactgctggtgttcctgggatgggtattctgatgaagccctccacgagatggattttccctgccaggtgtcttgccaggccctcagtccagagagatgcaaaacagctgaggtggaagtcggaaatgctgcagaattggttctttgtgtctgtaagatttcctggcacattcgttcgggggcgcagggtgttagatggctgcagattagcgccaagagcccaaggagatcaggtgctcggatcaggagggaaattggaagccgggagtgagcgatgggcctcccagccaggagggacggctggagcaggtgggcggtgataccagcgccgtttctacagctccattcttcaggccgaccgtcggtgttctccagaaatggaagcccgtggtggaaggaaatactaggtacacgatgtgctcggcacaggctgagccttgaacatgtgttagctcttccttatctttttattttggaaaatttcaaacatatgcaaaatgagaaggaatgatgtaatgagcctcagctttgacactgatcaactctataccatgcttgtcccctgcccctatttttgctagggagaggagaatcggggagtatataaagcaagtgctaaacatggggtatcatttcacccaccgatactctctccacatcccttcatgtgagctgttacctgaccctcaccacgagccaaacagtatggcccttcatccccactttacagataaggcaactgaggcttcccaaggccaagtggggctcatccttaggccacacagccagtgagaggtaaagccaggctccactcctcactttacccttaaccactttgcagtcattattagggtcattttaattgtaaatattcattcaacaaatatttttgagcacctactatgtgccagggatggctctaggtgcttggaggatacaaatgtgaacaagacagacaaaaacacctgctctcgtgcagcagacattctagtgaggaagagaaaaacacacccaagtaaacaaatgatgccaggtagctggggagaaaagcaggaggagggaagggagaaggttagtcaggacagagggagggccgctctaaggagcagaggcctcaagaaaatgtacaattaaggccaggtgcggtggctcacgcctataatcccagcactttgggaggctgaggtgggcagatcacctgaggtcaggagtttgagaccagcctggccaacatggcgaaatcccatctccactaaaaatacaaaaattagccgggcatggtggcgtgcgcctggaatcccagctactctggaggctgcggcaggagaatcgcttgaccccaggaggcagaggttgcagtgagccgagattgcaccactgcactcccgcctgggtgacagagcaagactctgtctcaaaaaaaaaaaaaaaaaaaaagaaaagaaagaaaagaaaatggaggagtagccacgggggatagcaagagccctccatgtgggaggaatggcagatgcaaaggccctgaggcaggaatgagcttgtatgttccaggaattgcaaagaggccagtggggctggagtgaaagtagaagaggtgggggagtgagcagaggtcagggccagaccagcaggatctggctcattgagcacctaacatggagcatgtctggcttgtgagaggatcattatgcattctctcatttaattctcaccacgggttctgtaagatgggaaataccgttaatccattggacagatgaagaaactgagactcagaaaggtaaagtgacttgcctaaggtcacacagcttttatgtgcagaactaggatttaggtccctgaatgctgcagcatccccattgctgctttccgcagccgtccttgcccccttcgggctcttcacccatagcagctggagtgaatcaagtcatctttggttctgctggaaacctttttcggtttccagcatggcatttctggaccacgtctgtctcttcatcctcacctcttaccactctcctgcctccttgggcttcagccttggcagcgtcctttctggcccttcaccagcttctttcccacccgagggcctttgcactggctgtctcttctacgggagcatcttccctggtcttcacttcctttgggtctcagctgccacctcccttccttggatgctgtcccaaccaccccattccaaaagaggttatcgcttgtgattctctatcactgggccaaatctgcctgttgcctagtgctcctagccctttctatattaattcatttcattatttcagccctgtctcctccactaggatataagctgcacgagagatgggctatgtctcttactcactgttgggcctcccaggacctcagcacagggcctgacacacagtaggtgggttaatagatactgattgaatgaaagaacaaggtgggtactaaaatcccccttttaaagaggaggcttggagttatgaggttgtacgagcaaagcttattccctaactaccacagtcccccccctgcagccagggccgggatcataccacaattccctgcccatcaagctgtcatgaatagccctaagatatcaggaagcacaaagatatcaatgccaggagggataggaggaggcggccaagaaaccccggaatttgtacttaaaattctggctacgcaaactgcttgcccaactttagacaccatgatgaatgatcaggtgctgcaaccatgaaacatgacgtaattagtgctgcactcttggctgggggttggcttggaggccccacctcgaggttagcctcccccagagggtcactgcacgaggcagtctggtgcggggtgggggttacaacagagggaggtggaatcagaccactcggcagccctgtgaccatggccaaatggttgtacctcccaaagcttcacatctggtcctccgtgaaatgggggtggcgacagccctgtcttactgggctcctgcagaggttccatgaggcctgtcttgctctgggcagcgtcgatgcttattagctattgttactgctgttatgtgattgtcatcgttttatggtttgggaattttaaaagctccatcttttgccagcggggagacctggaacccactcctctgccccctcagcctcagtttccccttctgtgaccgggaggcttggctcggctcctctcttgcaggtcccttccagccctgatgctccagcctgcatgtcctcctggccctttgtcctgatgactccacagactcctctgggaggagaggccatggaggggcttctgctctggggcacattcctgaattggagtccagcatgtgccgcttactggctgtgtgctctggggcaggtgtcttcccagctctgagcctccgtttccccatctgcaaaatggaaccgctaacactgtttcctcccaaatgggtgactgttgagggttaaggaattaagagccgtggaaagtgcttttgcaagctgcaaaatgctctataaaaggaatcagtgaatagtgtcagcttggggaaaaatcccgtcagtccggagactgtctgctgccggcagtgtgctgaaaccctggcaaatgtcgtttaataaatgcgtgttgcttttaagagggcctttatctcagctgggaaaatgtgtgcgcatccttggcaacctgagaatccagaagcctgaactggaggggacctgtcacagggagaggcgatcgcatggggtggctccagcctccagtgttggaatcccacctctgccacttacctacctctccagactctgcttcctcatctgtaggaggggacagtgacaatagcacctgccactctgggccaggatgtcctgagggctaaatgaaggcttctggttatctggcctaacccatgcatttcccccatgaaagtgtggctgtgcagcaccagggcctgtctcagggcaatggttggggcctggagattgggaggacctcccaacctcagcctctccaggccttactccaggcctcagtttcttcctctgcaaaatgaggaggaggaaaggtccttaggttgtcaaggcaccaagcctagtagatgtcaatgtcctctacctgctctctcagcctctgccggtcccccgaagcctgttaattctaaaggatatttacacagatttgcagttcttttcctgccactttgcaaacagggtcacactgcaagcatcgcttcatcacctccaggtttcatctgaacccagcaaatgctccatagggctcccagtgccgcctgtccccgctgcctccttgccagcagtgtgctcagcctgcttacaggcccatgccagaggggcctcatgcatgcatcaaggcagagctggttctgcctcggagaggatcccgagcctctcaggcttaaggacgtggtcatctgtcgcccccttcatctttagacacccatctgcatggtgacagctgctctgcattgagtacttactctgtgccaggcacgctagcccgtttcatcctcagaacaaccctagtattgttatcatcatcatcatcatcagacccattctacagataaagagccagaggtccagagtgggcgagacattccctggagtctcatgggtagcagagttggaatccaaatcaaaacatactttcagccagtgccaggcactgctccaaccctggggaagaaaactcagttcctgctctcaaaggacttataagtgagtctatgacagggagatgagcgcttttaaaaaattaacaaggaaatgcgtagctttttgagtgaggatgacatatcgaacaatgaagcagagccagggacattgaggtgggtagtattttagacagaatggccaaggaaggcctctcagataggcctgaaggagaggagcgagccagacatgtagatatttagggatgagagtgccaggcagaggcaatggcgagtgcaaaggtcatgtggtgagtggagaatctggcacgattgggggaaagcaaggctgtaggcccctggggccactgtaaaaattctgggtttcactctgagtgcagtgggggctgtgggagggttttgcacaaaggaggaacgtcacctgacttaggttttagaggcttctctggctgctgggggaatgtggctggtagagaggtgaggcagaggcagggaggtcagcgtggaggttcagtcagggtggtaagaagaggtcagggtctggccatgtgttggaagttgagccagcaggatctactaacagatgggttgtggaacacggatgaaagggagtcaaggaaatgtctcattctgagtccagcacttctaaccacagagcctctgacctggggagggagggggctgcatttcctgtttacaggtgaggaaacaggcttagagaaaagcaactttgccaagcaccgtgctacagacaagacataaaggtcatctggccccagaacctgagctctggacagtcttagcaccttagaagtttacctactgcatggatggggccaccagagtctgccccttccctgcagggatgtggcacagcactgagttctcagagctacccagggcaagggtgaaggagtggggaccctgagcccctgggccagctgtcagcttatttaccaggccacacgcatccccatttttggtggcttcaatgcaggtagcagtttctatcacagcacctggtttgtccctgcccaatgggtgtatccagtggtgccggcagaatgttcccagtgctggcctgctcttcagatgggcaaccgaaaccatccttcagggcgctaggttagcccagtcccaggtcctccccatctcagcttccttacagccagtgagcatgttccaaggactctaccctgagtcctgtcacctctgcgtctttgctcatgtggttccctcctcttggaatgccttccttcatcccagcctctgtcagcctttaagacctagctcaggggccaccagctccaggaagtcttcctgggtttcactctcttccagaaccccatccctaaacctcctcttgcaacaccgatcgccatgtgcgtggtcattgctcatgtccaggacggccccacatgctaagatagtctcaagggcaagggcctgtcttacttggctctgttttctgtggtatctaggacagggcctggcagcagagtgaggtttgagagggcatgaatgaatcattctgactccagaggaaatcactgtgtagtcctggctgttggagccccaagctctcttcttgggaactgtggcatccatgcagccatccactggtgcagccccggccatgaatgcagccccagctacctttcgccttcctgcatggggtcatgggctccagcagatggttctgggctagcctgttgacagctgtgccctgtggccagcacatagtaagtaggtgctctggaaaggttagcacctcctatcaagggcacgaccctagacagataccacacagggtgttgaccgccaggagcccatggcagacttgagggaagtgtgtctcctcacatcctccatcacccttgtgcttgtggaaacttacacagcaacctcatctattccaggcacatgcccagctggacacactcccgaacacaggcacacggacacctggggtgcacacaaatagtggcatgtgcatacctccctgcttgtcaatgcacacaccctcatagtcacatttacgcatacagcactctgtcacacacgtgccaccccccacacacaccctctacacacacatacacaccacactcacgtgcatgccgctcctgcatcactctcccacacactcacaccctcccacacatgcccaggccaccatgattcagacactctcctgcacacaattcacatgcccacgcccatgatccctagccccccattcagacacagtcctgtgttgcactctgacatattccggcacacaggcaccgtctctttcacactcctccttgtgcccacccatgtgtacatgtgtgtgcagatgcttatgctctgtacacgcatacatgtatgtacacacgtgtgttctcgtgtgcatactcttatgcaccctcagcacactcatgttcacatgttccattgtacagccctgtactacatcctgtgtgcatccgctttaatgtacactcatgttcacgtgttctattgcacagccctgtactatatcctgtgtacatcctctttaatgcactcttaatgttcacatgttctctgcatagccctttattacatcctgtttgcatccgccttaatgcacatttatgttcacatgtgctattgcaaggtcctgtactacatcctgtgagcaccctctttaatgcacactcttgcactgcatactctggcacacagcattaaatcacacccagaagatagtagaggcagcccccgatgaggagctgctataagtgcggggtggaaaatcgcagccttctgaggatggtgaataacaataatgatgagggaagaagggagccgggtatcactgcagccactttagaatgttgagccctgtgtactgccagagctccagccatagcctcccagaccctgggggtccttgagtacaaacaaagaatctacaaagaatccaaacaggtggcctcctgcctgtccctgtggcttgtgctgtggtgacccactgcttccgggggatgggcaagctcccatgcagtggcagtgagcacccgcctgggcaaggctggttcttgggaaatgtgcctgttggcttccttctccccaccccttgagacaggcttctggaagactcacaccccagggtaaggcagccctccccatccccgcctcaagcttcagttctaagttgatttttttttctattagaaaaaacatccatgtgggcagggcgcagtggctcatgcctgtaatcccagcactttgggaggctgaggcgggcagatcgcctgaggtcaggagtttgagaccagcctggccaacatggtgaaactccatctctactaaaaatacaaaaattagccaggtgtggtggcaggcgcctgcaaccccagctacttgggaggctgaggcaggagaattgcttgaacccgggaggtggaggttgcagtgagccgagattgtgccattgcactccagcctgggtgatgagagtgagacttcgtctcaaaagaaaaaaaaagtatccatgctaatttttttcaccctttatgaaatattttcatcttttaatctcaaaagccacacacatgaacattgttttttaagaaatcaaatatattttctaaatcccagtggtcagttctcagcccccatcttattgcatctctcagtggcattcaatgcaggtggtcacaccctccttggccaattcaaagaagagaaaggagatgtggcgggagaagcaggtcacaggaaggggccgggagatgggatctaagatgccagcaggagcctcttgcccaggggggttaggtacattccagatgtaatcatttgagtgatttctttgaaatccatctttgcctcgagggtggaagctccatgaggccagggacacagccatttcacagcccttagctcagggcctggcacagggaaggatccagaatgcagcactgaccgcacttgctgtggacactgagttcctcttacagcaaacatatggtgaccacccactgtgctgactgctccccttaggaaacgtgttcgtgtgttttgtttcattactttttaacttttttccaaaaccaataaatgttcactgcaaaaaaatacaatatatgatgtattataaagtaataagaaaacatgccgaccccatcctacctcagtcccatttcccagatgcaacacaccacagcatgccatgtttaacttatcatccttgcagacctttttctctagacatgcgattgaccaatcaacaaagatttatcgagcgtctacactgtgccaaccacagtagcaggagctggggaaacagtgaacaaaacagactaaatccctggaggagaggttcatttaaacagtacacatacggtaacatacatcattacatgtacaggttttttaaaaaacaaaatgagatactataaatattcttttgtgttcatccaatttagagaagctgaaacaatgcccaaagtaggaggggaaaaaaagagaaaaacctcatgaggtttagattcatgatccaaagagagttacattttatagctttgtttaataccctccagttgtttatatatagttttattttacaaagtcatgatcatacagagggtatagatttttctccatctttttttttcttacaaaagaaatgcaaacagaaaacataaacaagagcaaaatcccatgtaaatctaccactcaatcatggctaatctttaatatcattgtttttttctaaaattgggagtttgggatcacactggatctactacttggtaacagactctgatcttgtaacacatttccattgtaattctataccatcattttcatggctatagacttggcctatagctgtgaaagtagattcaccataatgggatcagccaatctcctttccttggatattaggatattttcaattttttattttcatacagacacttaagtgaatgaagcaaaatgtctgcacatattcttagttacctaaaggtatgatgttagattgtttttcttcactcatatttttactacatcagaatgttgattacagttatctttgatggtatgatgtgagattattactttgtttccatacttattttctctaaatgccttgcaatgaacaggttttatttgcataaacacaatattatttaaaatgatgccatgaaaatttctatatgaccaccgttttcatggtaatggcttgttacggctgcctgtaattccacataggggataggccgtaattcacttaaccatcccctatcattgaccggctgggctttttctaatgtctttaagatcgttatacaggaaacctactccatatctggggttacgtcctcagggagcagcccagcaaaggctggtgaacagatttcacacctttggttcatcctgccaagctgctttcccgaaaagatgttccaatttcccctcccaccggcagtgcgtgggaatgcctgcccagccgccctcctctccctgagacggttcaggcccctggacagtcgcatcctctgctaggagggcaagagaaagcaggaaataatttggccagcaagtgaccccagacccagagccaggagtgatttttaacaagcctgattctcagaacagaacctgcagagaaaaagaaagcaagcaaggaaaaaaaaaaaaaaacccctctctactggaaaaaacatacacatacacagattaaaataatatttggcacttacgtcgcacttttaaaattcttcaaacgctttataaacactagctaattaattaagccgcctaaatctggctgcagtcggtggagagagctcgagaggagctaaaaaaaaaatgggggagccagcgctacacaactccagattttattgtcgcctgcctggggtgtgattacaggcctccggctgcaccacaagaatagccctgctccaacatgctgcacgcctgactccgcagcctctcctgcgcctcctgctccctcaccaactgctgactcacagccccttgtggtgttattgataaggataataataactgcaagccaggctgagtcccgggctccgggcctgcaccctcccctggatatgccagtatcaactccacctaacacatgaagagagaggagatttgcccagggtcatggagccaacgacatccttccttccttcattcattaccgcattcattctgcatatttttatcgatgacactgtgttttaggcaggaggttggaaacagtcccttgtggatcctacatcctactattgggaatgtgacaatccagagaaaatcaaatatgtgaataatacagctatgtgataataatgggaataagaattaaaacttacccagcacctatgcagcaggcataccaccgtgtcagggtcctcatgactgtgctggggtggatgccggaaccccacttcatggatgatggaatgggggtccagggaaggtgggtacagaggtggctaagaggggagccatgctgtcacccaggcctgctggccctagcaactgtgcttccccgaggcagcctttccagttggtccagtctcgaggctgaaatacagacctatccggaaagttcctagctcagtgctgctggtgctgcctctgatgtccccgcctggatgggcctcccgggcctcccacacatttggccaccagcctcacccctctcaggccgtctgatgctggctgggcctctgtccactgtgggttctgtctgtccactgtgggttctgtttttttctcctgtgccatgaagatcttgccatgttcaacttcaaatggaaatgaaatgagaagctggacttcctgataataaaagcagttgaggtcttaagtggttgatcaggaaaaggaagtcgaaatggtaatatttacacccaaagcaggtggagtggtcttaggcactctgagactccactcacctgccatgagaaccgggccccaagggtgatcccttgccagagtcaagactgggtgaggctgggaatgggagaaagaggcaggacaatgggcagatagccctgggcttcctgcagtgagggcagataggggtctgtgagcctctttccctggctgccctgcccctgccagtggggtggtgccaggccatgggttggtgggcaaattcacagggtctctctcctccccagccagagccagaggggcacagcagctctggacatctgccgcagccttgtctgatgtacaaggcaaaggtggcccaggtcagggcaggacaaggtcacatgaagggtcagtggagagcccaactggggccccaggtcacctgtcacctgcataccaggtagctgccactcctctgtctacctggttctctccttctcccctattctagctcgctctctcactctgcgtctgtctctcaggcatgtgtttctctgaggtctttatgatcatgatctttcttttttttgtttcttgtacctcaccttgttcagaatcgaggccctggctctgccttgctctgaactgttctcacttggtccctatccatcttcaacgcatctcatgacaagctcgtcctgccctcttcctgtctgggctccccccgtgcaccccaatctctccacccagggtccctgtcttgtgtgccccagtgtctctgattggggctcaggctcctgcagccaacctctacaattccttccagctgcccatttgggagcccttgaggcctggactgggtccagctccagtgtgtccccatcacagtgaggcctggatcacagggcatcagcaggtgttggtgagagtgaagtttgagccacagccacctccttgtttattcaatgtatagtaacaacaacttcctcagggcccatctcagggctaagtgacttctatgtgtgatctcgttttcttttcagaacaaagcagaggcctgggggctgttctacccatcctgtagataagaaaactgagactcaaaactgatggataaattaaggtcccacaagaacaaggggcgagccaggtttcaaaccaggtccgatgactctaaagaccagatgctgcatttggacgctgtccccagccttggcttattttatcctcccagagatccatcgaggtggggtcatagtaactattttacagatgaagaaaccaaggctgagagcagtaagggcaaactaagggcagctcttgcatttgtgtgacactttgctagccaggctcagtcctgggttccaggtggggactcaaacacactggcacgagtctacattggatattcttggttacctgagtggtggcccaaggacacagctataggccactgatccagaactcaaactacattctcctactgcccaaaccgctgagtacagcctcccttctcggggcctgcatcctgggccaggccagaaacagaatcttaacaccttgtacagccccagatatgccaggcccctacctctgagtctttgcccaggctgttccctctgtctggaataccaggctcccttctggctcattcagattagaattagcccagctcagatgtgactcttccagagagggtccaggcattcaaacccactctctgccatgtcatttagctttctgtgcctcagtgtccccacttagaatacaggctcatgttgcaggtttgttgtgagggtcaaatgagatgatacatgcactatactgatctcacagcctgcttctggtgtgcatccagtcaatgaacgtcattgataaacacttgaggaaacacagaggatcacgtaaggatgaaaaaatgactgctttgtgctcctttccaggagtggcgggtgaggaggagctgcaggtgattcagcctgacaagtccgtgttggttgcagctggagagacagccactctgcgctgcactgcgacctctctgatccctgtggggcccatccagtggttcagaggagctggaccaggccgggaattaatctacaatcaaaaagaaggccacttcccccgggtaacaactgtttcagacctcacaaagagaaacaacatggacttttccatccgcatcggtaacatcaccccagcagatgccggcacctactactgtgtgaagttccggaaagggagccccgatgacgtggagtttaagtctggagcaggcactgagctgtctgtgcgcggtgagtacagcgtgggcctcctttgcctctggtttgtgacagtaactcaataataacaccctccattctttgagcaatgatcaggtgtggtggtaggtgctcctttccatgaattgatgtctcccccttttacaaataagggaagttgaggcctgaagacgtcatgctatttgctgaaggctccacagctggtaaagggtgggaacatctgcatccttcatctgcctggctgtgtagccctggcctcttcaaagctgacccagccctttcattccacagatgaggaaactgacagatagtgtgacttgcccaggcacaggaccagacctcacctgctgcctccagagagcacttccctctcagggcagccgagtctcctctatgtgacaggcactcactgagaacctactgtgtgccaggctccgccaagcttgtgttctcatcccttccaataagagatccacccagggcagggagcagagagggtgtgtttcctttatttcatcaccaaacaccaactgagaagattcctaaaaggcacagatttactgtttaatctgatggccctggtgagaggagaagccagagggttgggcattttctgtgggtcttttagaaaaacacttgtgtgatttagggactgattcatgcgtcactaaaggctctgaacaaagctgggtcatcatagaatgtctctcaccccagggaggaggtctcccttctaggtgactttgggttcctccgttaaggcagcaaagatgctcattttgtatttactgccagagccccaggatccttgttctaactccgaatcctgggacattagtacaggaaggaccctcagaccatccagcccaacccctagttacaggtggaaacttgaagtcaggagatgacaggggccttgtccacagtcataggcccagttagtgacaggatctggaccagagcccacatctgattccagggaggctccttcattagccattgtttacatagaagagcctggtgcatcataggtgccgactgaaagctccttgaacagaactgctaagcaggaagccagcacttctcctttccatcagtttcctaaaggttcagaatattcacattcagaccgttaggcccactggtgattggaaaaccgctcccaaatgtaagccatatcatttgatactgagatttcatatcaggatagagacctgctccattgtgtaatagctacagaatactccagcttatggaaataccagatttattttaccatcttccattgatggatacgtaacttgtccccaaacttgaactattaaaacagtcctgcagtggatgaccttatacatgtgtgaccttactcaggtgggagacgcccactgcaagtgccattgctagatcagagggggtgtgtgttttaatgtgtgtggatatggcctaatttccctcctagacattataacaatcaagtctccccacaaccgctggacataggcagggagggtggctttatcctgattgtgcagatgttacaggaaaagacgttgaagttcccagatgatgcatctcgtgcctagacaatcacagcaaatacgtggctcaggtgtgacccagatctgctgactcctagcagagtgctcactcctctttgccatgctgtcagcctaaatgatgccctggatgagaaaggagggaggtgggagggggccagggagcagcagctggattggatcctcatcctggcactttctccttttataacaagtacttatgaaggaagagccatttcttgccccctttacagataaggactctgaggctcagagaggagacctgtgtggtgagccagtgggggagccaaggtttgatccccaccagcctgactcacagcccctgtctctgtaacactcagctatgcttgtcaaagtgtggagaaatgctccaccctactcattccaaactcttgcagttctatagcaataagcataggctgaggcaggagaatgcttgaacccaggagacggagattacagtgagccgagatcgcaccactgtactccagcctgggtgatagagcaagattctgtcttgaaagaaaaaacaaaacaagtcctatgggagtaggagggactggcccccatcagaaaggtcctgcagatgtctcatgatatgggaacttgttcctaaaggacaggtctcagcacatcactgagtagcatccatggagcagagttgggcctcctgcagcccagcagaccacgtgcccacctactcacggtgctgaggactaaggatgaggagatgaggcatttcctggtgggtgcttggggctcattggagcaagagtttatattatcccctcaggctgtcaggagcccactgacttcagtttatggctatagggtaaccagatctgggtaccctggagggaggcttctccctagaactgcatgaagtcagggatctcaaagggaaaaagggaaggtggtggtcagtgtcagggttcatgaagttcaggcacttgctcaattgattgacatgagagcttggggaacactggaaatgcccattgggtacatgagggatgaggagacagtgccttcgcttttctcagcctcagtttcctcatctgtagaatggtgataatcagggactcctttggcagagtggaaaggatttgagttcctgtgtataaaacacccaatgcagagtagacacccccaaatcaaggttttttgtttgtttgtttgttttttctttttttttgagatggagtttcactcttgttgcccaggctggagtgcaatggcaccatctcggctcactgcaacctccacctcctgggttcaagcgattctgcttcaacctcccaagtagctgggattacaggggcacccaccaccacaccagctttttttttttttttttttttttgtatttttagtagagacatggtttcatcatgttggcccggctggtcccaaactcctgacctcaggtgatccccccacctcggcctcccaaagtgctgggattacaggtgtgagccactgcgccctgccatcaaggtgttattttaagatgtgttaccttgggcaacccagttccccttgctgagcctcagtttccccatgcgtagaacgtcgataattgtaccaacctttccaggatgttatgaggatgcaatgagcctggggcgacgatagaccttagtaagcaatggggttttcccaaggtcatgtgatcttgggcaaatcctggcttcccttgagtcctcagcttccctgtctatgaaatgatgatgatgattgccaaccctcacaggttctgtgaggattggagaggatgtacagagcctcggaatggtggcggtgttcgggttatcactgagctcctgcagaagtgtggttaggagagtgtggccagagtccaactgcctgggccacatcccagctctgccacctcctggctctgtgacctgggacaaggcactccaccaccatgggcctcagtgtcctcacttgtcagtgataacaccaacctcacagaccaggagttgggaccgaatgagttaaatcctgtagcgtgcttagggcagcaggcgcctggcctgcagtcaatgttcaacagatgtgagctgtgtgatgctgaagccatgcaacctcagatgggttagtgctcctccaggcctcaaggataaatggtccttaggatgtactcaggtagttttcaatcttggctgctctttaggatcatctgggaaacattgaaataaatcccaggctccaccacagaaatgcctcttcaattggcctggcatgggcctaggcatctaaagtttttaattaatccagaagattctaatacagagtcaggactgaaaacccctgggatagacacccagaggtcacggaggacaagttggaaaagatggtcctcttggggtgccagatgggagaacagcttttcagggtgtggatgcttctgaacaacgtgcacccgggacagctctttggaggccccagtggcctggccagaccccctcttatgatacaggcctcgggggccaaggtaggggccccagacaaagccctgctcagatccagcctcagtgtggggaaaccttccatcctgaaaatgtttttgtctaaatgaccgccggaatcccagcaaatccttccaattcggccccagaaccctccctgcctcgacacaccaagatgtcacggaggagtctgttccctcctcctttaaaatgcttccagcttctgtaaatggctcttctggagggaggcgcctgtgatcttgtgttttgaaagccaattcgccaaacttgtttcctgaggggattgtttagaaaaggggagagaatcctcacttggtggtttctgctccttgtatcatttgggtttgtcatgagccacagggagcagggtttgagccttttcttggtgtttctgctctgctttgttctgctgcctgaaggataaatgtgtagattcggaagcagtaatgaccagacctcctgataacagtcacaggggtcatttattaagcacctgctgcataccaggctctgtgcttgcattcatcctccctcttcttaacagggtggggtttgtatccacttttggccctgggcctctctgagctttgtcctaaaaggggctcacacgaggatcccctcacagagatggagtgaggattaaagagctgacgggcatggagggagcagccagtgtccagctccagagaagccctggataaatgggaactgattgcagcccctcagccctgtggggacatccaggccgctggcctcaatgacttgacttcttcaagtgacaccctccttactgtgccctcaaaatgtttgatgggtgtgagggagaagttaatatttacaaatgcaagtatgtgtgatatgtgcttcctggtgactgcgataggaggtatggggtaatgattagcaatttggagacacgtttacgacccatctgcagggagaaacagcccgcgttctgattcagccatgtgtgtgctttcaggacccaggaagtgcttctgcctgcttgggcgccctgtgtctgtgtaattaattgataattaaccactttggctttctccacacttggtgatctttagtgtctatctaaaactgacaccaaagaagaccgcagattcagaaaagtatcccttcctttcaaatttagcacttggcacagattagaccctgctggaatatttgtggagaaaatgaaaaatatgaagtaaattcataaatacctgaagagagagctttggatatgaataaagtctgggttaaagttagatctgtttttgcttatttttgtgaagcatcttctgtgtttatccaaagcaaaactgcttctgttgcctcatttaatcctcgctgcatcccagaaaggagaaatgctgctgttccattttacagacaaggagctgggtgtgccaggccgcccctctcatgggctgagcggcctggttccagctctcatggtgatgccacgttgctgcttactccctgcactgacctctataaacgctctctctgaggttggcactgttgccaggggaggcagggtagaaacagttaataccaaggatgagatggatcgttaattttgatcctgtgcccaaattgctggaagtcaccctgtgtggagtggagaagtttgaactcaggcctggacttccctctgggccctgcccctacactgtctgacctcacatgggtcctcacctctcccaacctttgcatcctgctctgtaaaatgacaataaggacaccgccctcattaatccttccacattattggaaggataaaaaataatgtctcagaaggttcttaacgtgtcacacacttatcgttagtgattgtcatctgagtcatgtctcctgattatcgatggtccttttgtagccaaaccctctgcccccgtggtatcgggccctgcggcgagggccacacctcagcacacagtgagcttcacctgcgagtcccacggcttctcacccagagacatcaccctgaaatggttcaaaaatgggaatgagctctcagacttccagaccaacgtggaccccgtaggagagagcgtgtcctacagcatccacagcacagccaaggtggtgctgacccgcgaggacgttcactctcaagtcatctgcgaggtggcccacgtcaccttgcagggggaccctcttcgtgggactgccaacttgtctgagaccatccgaggtagaagaccctcacccagcccaagcccacacctgaccgccaagcccaccccccaccaccctccactcatccagctctactcttgctccagggcttgaaatgcctggaacctaaattcctaactgcccacctcccatgcccctagatgtgccagccacttactaacattttaatggcagtggctgggtgaccacaccacccaccaggtgccaaggactgtgctagccgtttcatttatttcactgatagcaaacacagttaatgagtacctactatgaactaagcctctatgtgcttggtgattttctttattttgctacagttacaacattccaactgcatgccaggggtggtgcttatagatttccctcattcttagcctagtaggagctaccagtccttgagcacctactgtgtgctgggcgttgtgcttagtaatttcattcatatgcaaagagcaccctcaatgtctgagcacctgatgcctgcctagctctgtcctggtgatgacctcaccgtggtgggggagctacgttatggagccctccctgtgatctgtctgtgccacaaggtcagagcttctgccctgtgctgtttcagttccacccaccttggaggttactcaacagcccgtgagggcagagaaccaggtgaatgtcacctgccaggtgaggaagttctacccccagagactacagctgacctggttggagaatggaaacgtgtcccggacagaaacggcctcaaccgttacagagaacaaggatggtacctacaactggatgagctggctcctggtgaatgtatctgcccacagggatgatgtgaagctcacctgccaggtggagcatgacgggcagccagcggtcagcaaaagccatgacctgaaggtctcagcccacccgaaggagcagggctcaaataccgccgctggtgaggcctctatttcagctgacccagcttttttaaacttttagttttgtgggttttttaaatgttaaaagtagtaattcatgcttattatagaacaatctagaagtctataaatataaagtagaattttaatgtcagctccatttccccaaatcccacactccaagagtcaccactggtaagagtttgatgcacatcttgatagatcttttgacatagatttatatcacaggaggaaagagggagagagggggcccatctgttcatggtgtcctgcctcttgccttcttcacctgacagttgtcatgctccccattcctcactggcccagcccctcttccctactctttctagcccctgcctcatctccctggctgccattgggagcctgccccactggaagccagggtggagtcattcagggtgtttgcagcttgtctcacatacagtcagtgcttcagtgaacatccttgtgcatgttccatcccacatgtgactatttctgtgtgattgcccaaggaacactttaggccaaaatgcatactcatgtaaggaggagataatgctgtcgctcccctgagagagtgtgagggtgtcaaggtatcattttctcagcccttgcaacgtggtgttggtgtacatctcttttgttttcaaatggtggcacctgattggcatttcagtgcagccatggaatatttcatcacctgttatcaatgtggctgatgccctgtacatagtagaacccttgaatggattagaatggaagccatttctgtccttcatgcacccttcagggaagctctcaaagacagccttggggctgtgtcaaagtggccctttggtttcaccaatgccaggttttcttaggatgtgtagggcatcggccaatgctgggttttcatagtacgtgtggagcattggccaatgccgggttttcctaggacgtgtagggcatcggccaatgccaggttttcatgggatgtgtagggcattgggcaatgctaggttttcatgggatgtgtagggcattgggcaatgccaggttttcatgggatgtgtagggcattgggagacaggatgtgtggctttccacgccagctatgttgcatacttggctgtgtgaccttggacaagtcagtgcctctctctgggcctccacttgcttctggctgtgttgaaggggatgagcttcatgacccctcagctctgagtctcagctggtaggggccatgattatcttgctcagcattgtagcttcagggcctgaccacagtaagcactcagtaaatgctttttgagtgaaagaggataaaagagtcagttggttggctggttggttggttggttggttggttggttggttggttggttggttacataatccttagttagccaatgaggtagagatgactgttggccccagtaacagaagaagcagccagggtttggagggaggcttaactgacttgtccagggtcacacagctacttagtagcatagatttgaaagcacttttctgtggcttagagccctgcttctgatgaaccactgtgttctagtctatgacccccttacctgtgctgtgggcagtcaagcctccattgtattttcaagagtcctggttcagagcccctatgctaactcctgagcccagtgtgcatggcccaggtgctgggcacagaccggtcgtcagcccctgagctgtgcagagcctgctggccgcactgcccttcttccagctgctgattcagtttccagtggatctggggtgccctcatgaccgctctgtggttcactccagatgagaaggaacgtttctgttcctcaggagtgagatttctgcctgtatcctgcagcaggggttcctccgtagctgtcagctacaaatatattcccccctggcacctcagcatggtttttgtgctgttcatggatgagtctcgtgggcaagtgtgtacagacccatgagtgtgcccatgtggctcgagacatctaagaaggtccagccagatgttctcagttaatgatgcctgcttagtggtgaaaagcagtggtgggtttggttttctgtttttaatctgcatacgtgaagcctctattccatgtggtccctagagaacactggatctaatgaacggaacatctatattgtggtgggtgtggtgtgcaccttgctggtggccctactgatggcggccctctacctcgtccgaatcagacagaagaaaggtgggtgcattcccctcttcctccctaagggtttgtccctggactgtcctcggagggagacgccattaggtgctttgggttaaggacatcagcttctgccagtagcaagaagtccagaggtagtggtgctagggctggggcagtggcctcaccatgttagagtctgggtgggtcactctgtggcttccccctcatggttacaagatgttcatcactgccccaggccccgtgtcctcaaggggccactactgagcaagggagctgccagcctgggaagagaggaggcagggactcttcttacctgtctcagggaggacatcgtctttcccaggagcctcccggcagacttctgctttcctggtacaagtctaggttacatgaccagtccctggacaggaggccagagggaatggagataatagcgccaccatttgattgggaggacttaacaagtgattgcatgggaaatgttagggaagtaacctggcacacaagtgctcaatgtatgtcagccctgattattacccgtattgtatgtgagcccagaaatatgagccacctccctagaaagccccctcacagggcaaggtgcatagcctttgactgcacagcaggagggcacagggtcaaacccaggacaccgcttccccttgtttgtgtgcacgtgttacgtgtgtgtctgtgtgtgtgtgctggttgttgggagggttggttgttgctgtggcagggcctctgactttgaagtcagacaaaccagggttccagaccctggttatatactgtaaacaatcaatttggcctctacaagcctcagtttccccatctgtaaaatgggtttagcaacgcctgtcttggagaagttacaagatccaaataagcccatgtgaaataacgggtctgacacattctaggatcgccataaatacatgttctctttcccactcttggagaagacaattttaagctggtatttctgcaacctttttttattacaagagatagaaatacatttcacatctcaacccaacacatacacacaccctttgtatataaaattaaaactgatattttcttttttgtcatattcttttttctgtttaaaatgctggttgtgacccaccgcctccaaagggacaagtgctgtcccgagctgcctttctgtggcctggcacagctgagcttggttgggcacattgtacactaatcacgcatcccttcagtagctccttcacctctgcctcccaagtttccctccctcctgggctggctctgagatactggccaagcctgatgcttctgtctgggagggttggagtcaggccctgcttctccagaatctgcaagacgtcccaccaagacgtctacccaatgggttccctaaagttcctggagagccccacacagggaggactcctccttggatggggaagcaggtcccttccccaccaagggtgacagcccatcccatgggatgaagcattcatagcagccgatagtgaaatcctggccatcctttctgagtctcaggcccaggcagcacgccagctcctggcacacgtgagctcattactgtgggcttaggtgttgcagaggaatggagtttgcagggctgcagctctggtaaaggccacccagcccgagtggcaggtctgtgtgcagagcctagctctcaaacacaggctccagtgacagggacggctagtatcccccagcagttccaatgtgccaggcactgctcactgtgctttccctgtagtaacagtcagtgctcaccacagacctcatgggtgacattactaaccccactttacagatgaggaaactgaggcatgggaaagttataaaacttgttcagggcctcacagccaggaggtggtggggccagaatttaaacccaaggaccatgtctaggaccaccttgcacactacctccctccgccataactagaccccccttctccctcattaggccctggaggggtctgcccagcctctcaatgctcacagtgaaatgtcctgatttcaactcaaccactacccagctgtgtgaccctgaggagtcacctagtctctctggtgtaaaagggggtgactggtgtcctatcactggattcccagagatgacttgtgtccagcactttgcaacctgtcagcctccactcagactttcggtgctgagcacagcttccaactggtacacctcatctaaagatccaggacctgcccaggcagcaagcgttaacccagcagcaagaattcttgcactgtggcagcctccagcctattaaagtgcggtgcagagtgcatttgggtgtgcatgttgctttttaattacaattttacagcaaaatgggagtcaaacggctgctgaaccctggaggcttctctgtgggttaccccatatcacaggtttaaaacctctgaaccagatggacactttctttccttccaagatcctttttttggaaagtggtggcatgtaaataaatggatgctcagcccaaccctgcaagttatagaagctgagagagaggaagtgacccacccggggtcacatggtgagtgagtgggtagcagacccggggttcacacatgatccccgatttgcagccctgctagaatctgttttcaagccacgaagggcactgattgggacctaggcttgttggagggtctccgctgaggtttgtggttgaatggaggtgagacccagacagaggtagggcggttgtcgcctcccaggctgaaggctgcttttggacccctggcaacttccagaagtggaaaagcaggaccatctagcttactccttcccaggcttccttggtggaagaggatgcccactgggtgggcatgggggtctcctgtggttccaaggatgtgattacagcatttcctctccatgtccctggaggcaaaccttttgccaaaaaatagttacataagaaaagtgtgcttctagttaaacaactggcttttgtttcttttgtctttcagcccagggctccacttcttctacaaggtaagtgcatcattggtccagaccctcttgcagttattatttggttatttgacagccccccagactacaaagcataatccatgtccactgacctcaccaatgtgttggtcaacatgtctctttctctcctttgtaacctcctcacactgggtcacgctgtttttaattattgtcccaaatgaggggtttttttggtgcacagaggtgctaatttcttgcctgctcttcccagacaacgagacccttgtctaatcccatgtggactggggcagagacctcccgggctttctgtcctcacagacatcctgcacacgccaccggatgcatcctcccagatccaagttgtatactttactctttcctttgtttagtaaatatttattgagtaccttggcgtgctgtgaccctggaatgccgggatgagtaggatagaatctgtgccctctgcaagctcacagcctggtcagaggctcagacggtgacattacatcactgatgtacgtcaccgatggcactttagtttgttgattcacatttttagtgacttgagtccctactatgtgccagccctgctcaggaccagctggtgatatagcagtaaacaagaatcagcccaggctttcatggggctcagacgccggtgagagaaacaggcataaacgcagaaataaagtgattcatggtgtcatatcaggtggtgacaactcctaccctgcaaggagatggaggtgaatggtggggggctgtcttaggcagaggaagggactgcctctgaaaaggggatgcaaacgggtgcctgaaactagtgagctatgttggacaggagcatgctgggccagagaggaggcctgtgtgctgggccagagggaaggagaggaagaagataaggtcaggaagacccaggtcctcggcatcccggtgtcctttgcagatgcccctgcagtcagaggtgttacgaactattctgtgaaaagcctttatcggctttttggaaggcctctgatcttcatccccagcagagcagaggcagcacaccatcatctgccatgtgaacccatctgcatagaaccatgtggacatccgtgctaagagtgataaataaaactataaatagcttcatgttggttcacaccaggttttgccagcaactgcatagtgccaatcttttgatggtttagagctttctgggtttcagaattacagaataggacatgatgatctggagtggggcctgtgggtgttagaaggactcgggattttatccgcagtgggatgaggaaccaaaagatggacacgatctgacttttgttttaaaagtgtcgcctggctacatgtggagcccagactacaggaggtgaggatgtgtaggtgaccatagcggtactggtccaagcagaaaaagatggtgacctggaccaaagtggtgggatgggctgagaagtgctcagattctggatatattttgaaggtagacacaagaggacttgctgatagattggctgtagggttaaggaccacctcaaggttgggggcagtggagtgctgtatcctgagttggggggtgcaggtgatgggtggagtgatggggcaaatatcaggcaaagcagttgcatatagcaggagcagctcttctgccagagaaggctctgggaagcatcaggtgccccgctcctgcccagcagtgtgagtccaaggtactcttgggataaagccttgcttcttgctctgatctccacagggggcctcctggtctgagccctgcccagcctcctggccttttcctcccctgaacaagcagagccgcctctccagcaaaactaggctcttcactgccttctgggcacatgtgttttccttttgtcatgcttgtgcctgtcacactcccacacctaggtcactcttccaagggcaagactcgtttatatcctttgccaaaaaaccttcagtggctctacctgtccctccagataaagtccagatgcccccctgaggctcctgggccccttgtggtccagttgccttgaacagtttcacttctagccaccccctgtcctcacatttcacggctcaaccacactgtgctccccccttccctcctcccacagtctgccctcctcccccttgcacactgccctcactgctggggtgtgctccctgcccctgctcatgcactacccagggtcccccagctccaggggtggcaggcacagtgggctctgtgaatggcaccccctggagttatgcaatgtggtagctagagtgggacccctcctgtcacctgctcacctcctgcttctcctgagatcagcaagggcacgacatcctccagggtcggagggcttcctgtgaaccctcctggtgccgcagcgtggacaccctggtgtgttcaaggtgtctctgcacctgtcccatttcataacccacccctcaaggccagggccaatgtccctgaggttcactgcaaatagctgctaaacttggcaccatgcctggaatgggataggtgcttagtaaaggtttactgactgaacaagtgaacaaacgaatgaatgaatggatcagtgcataccatcctaaaccactgtagcacgtcccactctgccttctctgaatccctaaaatgctgcttcccagtggctacacagccccatctaggaggatctctcttttttgttttttttgttgttatttttttattttttatttttgagacggagttttgctcttgttgcccatgctggagtgcagtggtgcgatcttggctcaccacaacctccgcttcctaggttcagatgattctcctgcctcagcctcctgagtagctgggattacaggcatgcgccaccacccccggctaattttgtatttttagtagagatggggtttctccttgttggtcaggctggtcttgaactcccgacctcaggtaatccacctgcctcggcctcccaaagtgctggaattacaggcgtaagccactgcgcccggccctgttgtcattattttttacttgtcttacctccccgattagacaatgagtttctggaagaataggacattgtcgataatagtaacagcaatagcagctaccatttattgagcacttactgtgctcctggcactatctatgcctttatgtgtattaacccacttgtgattttaattcttgcaggaaccctatgatttatcactgtcccaagttcatagaacagtgtttttcaaacttgagtgtgctacagaatccccaaaggacttgttaaaacacagattactgggccccacccccaaagtccctgattgagaatctctatttccacaagttctcaggtggtgctgatgctgttgttccccagccacactttgggaacccctgttctagaaggttcttattccctatcctatggttgaggaaattgaggctcagagaagtcgtgacattcccgaggtcctgcggctaggaagcaccggaatgatgacttcagcctcgacatctcttgtactaaagctagtgccttcatcactgttcccatgcttcttgctgtctatttcttcttccccagagaaaccaaccgttttctgcctgttttttatttttccagcgtgagcctaccaagggagccatgagatcacttgctccctttcatctctctaaaccaaagcaatagctagtgagtgctaatggtggtttcccatgtagcagccagcttcggctttggcttgctgggatcagacattttccagaggacgttggtgtgagtaacagctgagcacctcagggaggctgcaagcggggaggctgccactttgagctcaaggggttcttcaggttgcagggctggtggagggattggctctctctaactccctgggttaggaatgtacagacagaatattgtctgtaatcttccccagctcagatgagagaaaaatgtgtctctgctcccttaatggggcactgatcattcgatcagccatttattcacttgtcagacattcactgcatttattcttggaatatttagggcttccctgagtctttcatttattcgtcgggactgagcctaactcagtgccaagccttgagcagagggttgcaaaggggagcagaaaaggcccacccctggtctcatggcacttaagagccagtgagaaagattcattcattcattcattcattcattcattcagcaaatacatatggactgctgacgatgtgccagcccagttcttggtgctggggcttcagcagtgaatgagactggcccagttcctccctgtgtgaagctcagtgtccgctgaggagacaggttaccagacaagctggaaagttaataagggatgtggtgcagctgctgactagataaaatgaagccaggtatgggatagagcagatcaaggaggtggggtctggggcgagcagggagggcttgtctgcaaggtgacatttagaagatcactgaaggatgaggaggttccagccaagggaatatctgggacaagactgcaccaatcaaagggaacagccagtgccaagaccctgagacgggagcagtcagatgcatgcacagaacgcagaggaggccagaggagctggagcagagcagaggcaggagagggatggagcctagagcagttggccgagctgagccttggagctggtgtcacttgaccaccttggagtggttatagaggggttgagcattctgagcagaaaagtaacatgacatcacttatgcatttcagatagggagaatggagggcagggaagcaggaatagaggtggggagatcaaggaggaggttcttcaggaatcaggggagttcggatggtggagaggatggggtggctggctttgatggatattttggaggtggagccgacgagccctaggttggattagatgagagctgtaaaggaagagagagaagaatcaggactgactcccacttctccagcctgagcacaggatgaccgatggtagagctattcactgaaataggaaaatccaggggagacacagatatggggaaaatgataattggttattgtctgaaattgctttgaaagagaagaacccaatgttttgagaatggagtttgggggttcagtgaatatttccccaagaaaaggctgtttaaaaatagcatctgaaggaagaaaaggattaaagcagattaagaggcagcagcatggagcatgcaaaggccctggggcagcctgactggcattcattccaagtcactgtttttgagcacatgtggtgaggaagcatggcaggcaggcaggcagacagcaatagaaaccagatatgcagatagacaggagatctgagattgtcatggaggggcagcccagccagcgcagcactgtcagcagagccatcacaaggtgacaccatagttgagtcttgaaggaaacaggaaagttagccaagaggaaaaatgatcaaaggggtccttcgaggctgctattgaagcatgaagtacataacatcaaatgccaccccccccccgaaatatctggtgggcagatgagtgggtacatgagggcagggcagtgaattagcctggaggcagcacgtcagaccacgtgggactctgagcagggcgatgagttggacttgaaccagccagccagtgggaagctccaggagggctggaggccagtagtgtggggacagatctgcgtgatcttccccagcagacgtgcccctgctcctggagggttctttctgtggccacgtggggcttgtcatgtctcagaactgctttcagagccaagcactcatgccaaatccattaataaccctgctgccaagccccactgctcatttctgacattatccatgctaacatccccggggttgccggcttgagaatttacacaacttctgccaagccagtggctctggtttgctcatcaccttgaccgtgaccctccagtgagtcaagtcatgacctccaattacagaagcaagtgcacgaacaacttctttgattaacttggacatcttggtctttttcttttctttctttaatgatgatacatagatgtttataatacagaacatttggagaatatgggaaactaaaaaggagaaaaaaaataccatgcaaagaccactgcagtttgcattttgctatgtttccttccagtgttatccacacatttttcataattgagataatcctacagagaattttcctttttcacttatcattttaatgtaagcaattttaacttaaaaaaaaaacctcctcataaaccttttaaatctttatctgtggatttatcctaatttccctaaccagtcccaattggcagagccctaagacataaacctcctcccccatccagcccttgacaaatgcctttgtgttgaaagctttttctatattttgaattcccccaaaaaaaagtgcaattatgagtcaaaggatgaggacatcttccaagctcttgattttgccagctgcttcccaaaaggattgtactggtttgcctctcccaccagtgacgtatgaaagctccagttcatttcaccatagcttccccagcaccaagtattataatttttaaagatccttgccaatagagtaggttaaaaaaatgatagtgcattgcttagaattcctttttagtgagattgacccctttgtccaaacatttgatatgcagttgtatttctgttatgagtccttcgttcatgtcctcaacccatatagaaaatggagcctaaatgttattcttatcagtttgcatgagcacttgagatagtgagggtatttttatctgtgtgtctctttcctttttaggttgcatgagcccgagaagaatgccagagaaataacacaggtacagtccttggtgagatgcccttcctgggaaactccgtggcgtggttgcttcacatcaaccggaattgcagatctggttctaaattaagactccttgtggggtggagggtggaggatcttacactcctagctttccccatgtcctgtgcatattccttctctctactgcagccaagagtggctgttgcagcctcatgactcagtgcgacccattgcacaactccccaggggcaccattcacaatccgtcctatgaaaatggtgccctggagtcaggctgcagctcccttagtgtggatcgtgccttcccatctctctacatttgcccaggcccatccctctaccaggagcgccactcccagctcactgcccgctcctcacagccaggcttttctatgctggaactgcaaagcccagcctgccagggcctctcccacctttgctgatggaaagaccccatgtcattaattacctcacacaagggcacactcactcaagctggaggtttctggtcagcattgctgagatgattttgcagcaacacggtttctgagaaacctagccctgcttatcaccggctgatgctgtcagaccttgaaggcagagggctgctcagcatcttgtaacaagacaggccctgctctgaacccggaacgagagcgcgccagctgtccttgacatttccaaggcagttgtcatctttttagatgtaatctgttgaaggagtcgggctggtgaaaggcgcagcatttgtagaccaaaatgccttggccctgcccttgtgacccatggggtccccccgcagccccggacatgagctcgagttgtaattaagaaaaaacaatttccagtcatgagcgagggagatcttctcccccatcattttacttctggacttcctcctggaatcttctgggggaaaaaaatgatggtgagaagaatgggtcatggaaacctctacgaaattcacagcagagacttactgggcacccactgtgtgccacgcactggacagtgagccagacagtcacagcccagctggcagagtgcctgcgattccagtgccaggtgccagccctggccagggagggagttgcacgctgtcaacacggatttcccagacagaagcaaatgagagcacgcagggctcaggacagaggagctgtgtgctaagagcacagtcgtagagtccaacacactttggttctttgccagccggacaactttgtccactttattgaacctcccttggtctcagtgtcttcagccgtaaagtggaatagataatccttcccaagcagggttgtggtaagagtggatggggtgatctatgtgattgtgtgctgcttgtaagccctgagaactgaaatcagccattaccgtgcaccaactaggaggtgtgccggttggtggtagctttattctgttctatcacgcaggggccagtcacagagggagcaaagtttatcattcatgatgggcgcttttgaggcggcagtggcaggttgataggattagcacatgggaggtatccaagtttgctaagtggttaatgattgcgaacatttattgaagacagatgctcaataggtaccaggctctgttctaaacgctttacctggataatctcattccatcctcacagcaaccctggcagtagacactattatcatcccctctttacagatggagaaactgaggcccagagaggttaagtgaattgctcaaaatccctgagctagaaccaggattcaaacccaggctttctgactccagaacgtttcccgcttcactaactggcgatctcgttcttatactgcccctgttctctgtctccctgtccccagctttgccctgagtgaaggtgaaattattgccatccactcatatattcattcaatatggatcagacttcttatgtgccagccttggtttctgaatcataacaaatgcccagtgaatatttgtggaataaacgcatacattaatgaatgtccccacacgtaccaccatcagcagcacctcctcaggcccccaaacagacatggtcctgggtagcgggccctgtgatggaaaacaaacatgggctgaggaagcacaaagaaggaacatggaccctgccaggagaggggagagccagggagggtcttagtatgagccatgcttcatctgaaatttacatggtggattgggatttgttacaaggagaagcaggacagacaccctcgagggatgaacatgagaaatgggtgaagactgcaggtggttcaggctaggaggaggcaggaacgggaggaggtgacactgaggcggggctgtgaggagactgcactgtgcgggtcagaaagacccttcaggcagggtgaggaggagggcagatgggaaggggcaaggctggaggcaagtaacgttggcaagagatgaggggaacatgacttatggctgagccagtgtgggccgagaggacacagaagcatccagacttggtattcagtttgagtgagtgggccaggggctatagaatgaccttctcatgactttctctttgggtatcttaaatccaggacacaaatgatatcacatatgcagacctgaacctgcccaaggggaagaagcctgctccccaggctgcggagcccaacaaccacacggagtatgccagcattcagaccagcccgcagcccgcgtcggaggacaccctcacctatgctgacctggacatggtccacctcaaccggacccccaagcagccggcccccaagcctgagccgtccttctcagagtacgccagcgtccaggtcccgaggaagtgaatgggaccgtggtttgctctagcacccatctctacgcgctttcttgtcccacagggagccgccgtgatgagcacagccaacccagttcccggagggctggggcggtgcaggctctgggacccaggggccagggtggctcttctctccccacccctccttggctctccagcacttcctgggcagccacggccccctccccccacattgccacatacctggaggctgacgttgccaaaccagccagggaaccaacctgggaagtggccagaactgcctggggtccaagaactcttgtgcctccgtccatcaccatgtgggttttgaagaccctcgactgcctccccgatgctccgaagcctgatcttccagggtggggaggagaaaatcccacctcccctgacctccaccacctccaccaccaccaccaccaccaccaccaccactaccaccaccacccaactggggctagagtggggaagatttcccctttagatcaaactgccccttccatggaaaagctggaaaaaaactctggaacccatatccaggcttggtgaggttgctgccaacagtcctggcctcccccatccctaggctaaagagccatgagtcctggaggaggagaggacccctcccaaaggactggagacaaaaccctctgcttccttgggtccctccaagactccctggggcccaactgtgttgctccacccggacccatctctcccttctagacctgagcttgcccctccagctagcactaagcaacatctcgctgtggacgcctgtaaattactgagaaatgtgaaacgtgcaatcttgaaactgaggtgttagaaaacttgatctgtggtgttttgttttgttttttttcttaaaacaacagcaacgtgatcttggctgtctgtcatgtgttgaagtccatggttgggtcttgtgaagtctgaggtttaacagtttgttgtcctggagggattttcttacagcgaagacttgagttcctccaagtcccagaaccccaagaatgggcaagaaggatcaggtcagccactccctggagacacagccttctggctgggactgacttggccatgttctcagctgagccacgcggctggtagtgcagccttctgtgaccccgctgtggtaagtccagcctgcccagggctgctgagggctgcctcttgacagtgcagtcttatcgagacccaatgcctcagtctgctcatccgtaaagtggggatagtgaagatgacacccctccccaccacctctcataagcactttaggaacacacagagggtagggatagtggccctggccgtctatcctacccctttagtgaccgcccccatcccggctttctgagctgatccttgaagaagaaatcttccatttctgctctcaaaccctactgggatcaaactggaataaattgaagacagccagggggatggtgcagctgtgaagctcgggctgattccccctctgtcccagaaggttggccagagggtgtgacccagttaccctttaacccccacccttccagtcgggtgtgagggcctgaccgggcccagggcaagcagatgtcgcaagccctatttattcagtcttcactataactcttagagttgagacgctaatgttcatgactcctggccttgggatgcccaagggatttctggctcaggctgtaaaagtagctgagccatcctgcccattcctggaggtcctacaggtgaaactgcaggagctcagcatagacccagctctctgggggatggtcacctggtgatttcaatgatggcatccaggaattagctgagccaacagaccatgtggacagctttggccagagctcccgtgtggcatctgggagccacagtgacccagccacctggctcaggctagttccaaattccaaaagattggcttgtaaaccttcgtctccctctcttttacccagagacagcacatacgtgtgcacacgcatgcacacacacattcagtattttaaaagaatgttttcttggtgccattttcattttattttattttttaattcttggagggggaaataagggaataaggccaaggaagatgtatagctttagctttagcctggcaacctggagaatccacataccttgtgtattgaaccccaggaaaaggaagaggtcgaaccaaccctgcggaaggagcatggtttcaggagtttattttaagactgctgggaaggaaacaggccccattttgtatatagttgcaacttaaactttttggcttgcaaaatatttttgtaataaagatttctgggtaataatgagtccttccggtgttcagtattcttgtctttgtgagtgcgtcccggggccgcctcggggcctgcctgccctcctgccaaagcctggaagaggattgaatggaccccagggtttggaaacaacctacagcatttgagcccctcacgtaggttttagagacgtacaatttttgtttgccctggctcagaaggagccggtgtaaggttgagataaaattccatatagacaactgagtttggatctcggctctgctgctttgtagctgtgggagttcaaacagcacctctttgagacttgggccccgcgtcggcacaatggggcaggaatagtccctgccagggtgactgtgtggattcaaggaggttggaagcactgagcccacgcttggcactgggtaggccatcactgaggcttgtgtctttccttcctgccctgaccctgcatagctgagtctcgtggcctctcaccactgatgggatctcggacacccggctcaccctcctcctggggcctcactttccttccccaccaaatgcagacatctaatgcttgtcctgtaatatccttgccagatgactgatgtcaagtgctggtttatagtgggtgctcaataaatgttagtttcctttctatccctccattagatcattaatgatattagtgctaattatgtaataaagttaaggcataaatatgttaa

SEQ ID NO: 114 - DNA, 77754 bp, Homo sapiens
acaaaggaagtgaacttggagatggccagcagctccatgtcacacagcaatgacactgacataaatggctcttgagagcaaggactggcaggacctggctacagatatggggactcacgttgaggtggcactgctcacctggagcagcacactggagtcacctgggaccagcctcctagaagtccagatgcgcccgcctgccagagagctccgagatttttcaaaactcctagagacagtggttttcagcaacggcgggcacattagcatcacccgggaccctgaaaaagccggttggcccaggcggccctcgcccagaccaattcatcagaacctcttggggtggggtggggcggggctgggatggggagcggcagccggggtatcaatatttttgaaaactgcctgaataactccaacgctcaagcaagtcaaggacacccacggactcaacaccgcgaccagattggaaaaggtgtaagttggtgcttgttgttcgcgtccctgtttgactggttgctacgccggtgggaagggcgctgggtgagagcgggaggcagctccagcccacaccgcaggatgcagggcggggtccgcgcatcctcggcggggcgcgggggttggggagctgtggcctcccgtactcgccgcgcgccttccgcgcccccgggctcgggcctggaggactgggctcccgccccgcgccccgcgcgccccccgcgcgctcctttctaaagtaaacaccgaggagcggcggtagcaggaccggtgcaacccagcgccgcccacggccgccgctcgctgcctgcctcggtgctgcaggcccggggccgagccatggccgagggggtgccggcctcgccgtcgagcggcgagggtagccggggcccgcacagcggcgtcatccagtggtgagccgccaggcgcctgggacgctgggatggaggaggtggggccggggaggggaagcgtggttcccgctacggctgccctcgggacgccgggtcaaagccgggtgtgaggagcggccccaggcccagcgctttctgatgctcgcccgccgcagcgcggagggacctgccatgcacgcacacgcgtaaaagccccgggcccgaatcggcgatggggccgggcttcccatctgtgacttccccgttgtcacccttcccgcggaaagccatccggtctgccccgcggggacccgttggttggaccctgcttccatgtacatccaaaagctcctgggccttgccaggggaggaaaagctttctctccctagatccaggatgggatgtttcctaatttaaagcttaggagtttttagctttagcaatgcattccgcattgtgaaattcacttccagctatttaagtcgaagcaggaaaaaagggaaagaaaaatatcctcagcccttgggactgagaaactcatggggttgcagatcttcttaaatagaaaaataattgaaaccagttctaggacctttagttttacaaggtgaataactgttatataacagagtacatttttctctttttaagtttcaaagcatatttctcagggaagacttttgaaaaagtcatgtgagtgaaacaaaaatgaagggcgtgtttgtgattataaccctggcaggcctaaacagttaccactttcctccaaaagaacatttttgacatgtcttatcttcaatgagaggaaaaaaaatcaaatgaataaatactgaagtacacagcgtttttcagtgttacacagccgggctaggtttctgctacactcaccgacccaggcccctcatgcatcgttcttagaagaaaggactcaggatgcctttcaatgacttcagttcgccatttagtaaattagagtttccagggtttaaattatgctccagagacttgaaagaatgatgagactgattaaaaaatacctgaacatcctcctaagaccgcttgtgaactcacttcaaatggtaaccagggggcttatgatggtctagaccaagcttgtccaacccttggcctaagggctgcatgaggcccaacacagatttgtaaactttcttttcctttctttcttttctctcttttttttttgtgacagagtcttgctctgttgcccagtctggagtgcagtggcacgatcttggttcactgtgacctccgcctcctgagttcaagtgattctcctgccttatccttccgtagtagctgggattacaagcctgcaccaccatgccttgctaatttttgtatttttattagagacaaggtttcaccatgttagccaggctggtctggaagtcctgacctcaagtgatccacttccctcggcctcccaaagtgctgggattacaggtgtgagccaccacgctgggccttcataaactttgttaaaacattatgagattttttttgtttgttttggctcatcagctatcattagtgttagtgtattttatatgtgacccaagacaattcttcttacagtgtagcccagggaagaaaagattggacacccctggtgtagaccattttagcagacagtctgacttactcaagtcccatattacaagttcctatccctataggccactcttcaaggttggggggtggaggcaatggaaataagggaggggtcaccttttcattggggaggacttttctttagaaatcatccagttgatgaggtggtatgtttaacagatcgttgaggccgggtgcggtggctcaggcctgtaatcccagcactttgggaggccgaggcaggtggatcacttgagctcaggagtttgagaccagcctggctaacatggtgaaaccccatctctactaaaaatacaaaaattagctgggtgtggtggcgggcgcctgtaaatcccagctactctgaaggctgaggcagaagaatcgcttgaacctgggaggtggaggttgtagtgaaccaagattgcgccactctgcttcagcgtgggcgacaagagtgaaactccctctcaaaacaaaataaaaaacccaaaacagatcgttggtactagtggttttaacgtcaacatcaagaacagcctctggtattccaaagcctggaaggtgttaccaatgctggaggagcagtggtgggtagtgcagggcgaggggtctgaacgcctggagacatctccattagccagtgtctgagtgaaagaccagggaggggcccaactgttgccctgtggaggaaacctgccattttccacattacttcattgttttgtcttctaatcagtcgcttgttaggaccccaacatgtcttagagacatcagtgccactgtcatccatattggataaattctcccaggagaaaggccccaagagagcttggccaagtctcaggggccagaggtaatagaaggtttctgtttcatggacaggaaagactgcagaaacggggagaggtggggttaaagctctggggagcacaaaggaatgaagaacagtgatctgacttccttgctgggatgcagacctagcaggtctgacccctggtttcagaccaggcaaaacctaagcattatctaatcccaatgcatgctgagccctggttgtagactacataactatctcccacatagacttttacaaatttctgcagactctgttgaaattttaaaaatacaaatttatttggaaaggtgcagaattcatggtagcttttgatcagccgtatcgaaaaggtactatagttcctagtgtggggggctcatgacatttttctttgtttttttgtttgtttgtttgttctgagatggagtctcgctttgtctcccagcctggagtgcagtggcacaatctcggctcactgcaacctctgcctcccaggttcaagtgattctcctacctcagcctcctgagtagctgggattacaggcacgcaccactgcgcccagctaatttttgtatttttcgtagagacggggtttcgccatgttagccacgctggccttgaactcctgacctcaggtgatctgcccatctcagcctcccaaagtgctgggattacaggcatgagccaccgcgcccagttgctcatgacatttttctttaaagagtactcagaggccgggcgcggtggctcacgcctgtaatcccagcactttgggaggccaaggcaggtggatcacgaggtcaggagatcaagaccatcctggctaacacggtgaaaccccatctctactaaatatacaaaaaattagccgggcgaggtggcaggcgcctgtagtcccagctacttgggaggctgaggtaggagaatgacatgaacctgggaggcggagcttgcattaagccgagatcgcgccactgcactccagcctgggtgacagagtgagactccatctcaaaaaaaaaaaaaaaaaaaaaaaaaaaagagtactcagaaaacgtgtgaagcactggctaagtatttgtgctctgaggtcagtaatcatcagattgttcatcactcaaagcgaggagaacatcatgaacggtctcaagatcttaataatccaccttgtctgatggcaagaccaggaaaatagtgttattacgaagctaagcaaggaatctagtgatctgattcacttcaaatgtagacaggctttatttccaggtgtatcaccaaaggacattttggtggcagagtataaaacccttaaccaatgtcacctgccggcagttctgccagtccccaatcggtctctccttggagccccaggtggttggaagtcaggctcacctacagcaggtgctctgtgtagccactctgccaacatcagcatctttcttgcttccattccagattttgatggtagacataaaaatgataataataagagcttctgtgtgcaagccacggtagtaggcaggtcatgtgcttgttttctgatcacaaaaactctcaggtgtctcagagtcagaatggaaacttaggtctttgaggttcaaagcccggggtatgtgtgtggacactgaaggctgaggcaactactgggtgacactgaaggctgaggcaactactgggtgacaaagtccactttcaaaccttctgcttgtccagttactgtatgctgactggctgccactggtcagtctctgcgatttggcttagaatattgggcaaatgaccacagacacatggtcagaaacagaatgaatctcttggaactgccaggatcaaggcagccacacagggctcacatccgaaggcagccctttctttccatgtgtggcatagaaaggactcttggccacagacctttactattattcttattaagagtattatttggccttcctattccacttaggtaacaggcaggctcggtagtatcattttgaaattgggaggacagcaattcatagagacttagaacaaatgagcgtctgtcacaggaaagaacaatcagcaaacatggaaaactagagttcattttaaggagtttgtattttttacacttcttttttaaggagataattccctaactaaatctggagtaactatgaataaacagaagtgagtttgaattgaatgcacatcacattttgccacagtttcccggatttagccaacatttttctgtgataacttccaatagtgagtttttcatatatcaacaagtagtgtcttaacaaaagaaatataagccaggtgcagtggtttgtgcctgtaatcccagcactttggaaggccaaggtgggaggattgctcgacaacaggaggtcagcactagcttgggcaacatagtgagaccgtctctacaaaaatttttttttaagtatctggacatggtcacacgcctgtagtcgcagctattcaggaggctaaggcaggaggatcccttgagcccaggagtttgaggatgcaatgagctatgattgcaccactgcattccagagggagtctctctctctctctccatgtatatgtgtgtgtgtgtgtgtatatatatatatatacttatatatatatacttatatatatatacacttatatatatatacttatatatatacacttatatatatatacatatatatacgtatatatatatacatatatatacgtatatatatatacctatatatatatacgtatatatatacttatatatatatacttacatatatatatatgctggctatatatatgaatctgccactcccccatgccaccatcccatcgataggtatcaccctgtactcagccttgagccaaataattgatgcagtagcagctgcatttaagccattgtgaagtatctgaagtgtcaggctcccacaatgattttgggaagcatcccagaaaaatctacttccttgatgcctgtactgggttgaatagcatccccccaaaaaaaactcatgtccacccggaacctcagaatgtaaccttatttggaaataggatctttgtagatgtaattagttaaattgaagtcatcctgaattaggatgggctctaaatccagtcactggtatgttgataagaaaattcacagagatactagccatgcacggtgactcatgcctgtaatcccagcactttgggaggctgaggtgggtggagcgctcgagcccaggagttcaagaccagcctggccaacatggcaaaaccccgtctctactaaaaaaatgcaaaaaagaaaaacaataaaattctcagagatacggacacacagggagaaggctgtgtaagacacaggcagggactggagtgaagccgaggaacactgaggaacaccgaggatttccagcaatcaccagaaacaaggagaaaagtatcgagcagggtctccctcagagcctctggaaggaaccgaccttgctggcacttggatttttaagcttccagcttccagaactgtgagaatacatttctgttgtttgaggccactgggcctgtggtaatttgttaccccaaggaagcattgcagggccagagattcccctattccttatgtccatgtgtctttttttctgggaagccggtggggttaacaattgtgactatgtcctttagttcccaaggaaagtaagtttgggcctcagtgtgcctcattccagaagataagctgtatactacccatatacccatctagagcaaaatacccatatttttctctagaaaaacaaatgccaaggagacgtattgtctgtaaagtctctgctaaataaatattcctctttgtttaaaaattatactggcttgctttgtatattttttttaaagaacgatggtctgtcccaccgggaaaggaaggtagtggctggatgtcactacggacactttctgacccaggccaccttcaccactcacctccacgctcacatactgctgctggaataggcgcctggctgtccccaggggccggggctggtctgtgaacctcagccagagcctctcattggtaaggaatacactctgcctccagaccaggagcatttgggtagttgaaggtcccactttgagcagaggtcacaggcactgcaggtgcgttcacaggcactgctgcattcgctctgtgctgctctggctctgtaccaatagggaagaaagcagagcaaaagcactctgcctctcttggtgtctcttgatgtcttgcattttacacctcattgcaattcaaagaatccaaacataatggcctgccctaaaccacaggggtttaagaaccatgcaagcaactgcttcagaggaacagggatcagagagggaaggatgtgaaaacgggccctgggaagccaggctggcccctgcggtcacctgcaggggtgataggacttacctgggtattgttttgtgtcttattcataaagtggaataaataattctccactttgtagttatgtagctcttggctgtaacctttgtaaaggtctatgaaacagcgtctgctgaagtcctaatttgaacttctttttagcatgccaacctgccaggaaacaaacaaaaacagaaacacgttatgggcttctgatcttctaaaagccacagtcaatatacttaacactggcctaaggacaaacgggtacatagtgatgccagttgtgagccttcgcagggattcatccaataaattagacatgtttcatttattggaacctcatacacatcttgaccattgattttgtcaaaatattttgctctagaaaaacaaatgccaatttcctcctccttgtcctcctctcctccaggttggtcgacaacttctgcatttgcgaagagtgcagcgtccctcgctgtctcatgtatgagatttacgtggagacctgtgggcaaaacactgagaaccaagtcaacccggccacctttgggaaggtaagttgttgaagattaagaacgctctattcactgagtgcaaaaaagggaagcaagttattggaggaaatgttgcaatgtatttgagtctaatggattttcagtgggtatctttggcttccttcccaccagctggtcaacatccttcagctaattgaagagccatcctgttagccacttccctttgtccacacttcatagtgaggggccaggaaggatgaggaatgggtagcacctaagggaatgtaattatggcagctccaagcactcctcagggagccaggtttgctggcatggtattccctgcatagaagtgccaagctctgagagccgctttggcaccacacaagctgagagccactttgtgatgtcagacaactgatgtttctcacaatttggttgcgctgagagaactcattggctcttaaaagatctctggaggttaagatctttttttttttttttttccgagatagaatttccctcttgttgcccaggctacagcaatggcgtgatcttggctcactgcaacctccacctcccaggttcaaatgagcctcctgcctcttgcatctgtatgtccaggagtgaacttgcagtgtcagggggtgcatggctgagtgacatcaagggatgtggccaaaccattaccctccccacagcaatcgtgtggatttcaattttacttacaaaacattgaaatgattagatccgttcttccaaacacagtcttcgtctttgaaacttctgttcatttgtggaagttctacacttttgataatcacagaatcttctaatatggaggctgctcacatatttgaaacaactgttcacctctccctgtcttccctttgcctccctgcccacctgtttcgttatgacttcaattattgacgtttcccttaaaggtggccccaagggtgcaacgcagtccctcagatgtgctcaaaggtcaagagcgcttacctttttttggctactgttggcttttatttttctgtatctgttcagtttaagcttgtagtcaacagaaacaaccttaagtatttttttctaaagagttgaaattaaggtaagcctcccaaaacagtcttgtaaagtgtaaaatattaatactctatataaatacaaaatgttgttgttatcatactgttatcatcatgtaattaactatttgaacccaagagtagttattctcttattcctattgtattttacctcagttttttgtgtttttttgtttgtttgtttttgttttttgcttttttgagacagagtcttgccctgtcgccaggctgaagtgcagtggcacgatcttggctcactgcaacctccgcctcccgagttcaagcgattcccgtgcctcagtctcccaagtatctgggactacaggcgtgcaccaccacgcccagctaattttttgtattttattttagtagagactgggtttcactatgttggccaggatggtctcgatctcccgacctcgtgatctgcccgcctccctaagtgctgggattataggggtaagccagtgtgcccggccacctattcagttttgacctgcagttctatttctcaccatattcttgaatcacaggtggttcatccagtcttcccaacctgctgaagtggctatgtttgaaaagtgtgtcttttatcaagtcatcttgctaggtgactctaagcttttcccagtagctgggaattcccccagctgctatcatccaggtcatattttgccatttcatcactccaaatattggcaaacatcatccaaggctgagctgagtgctgggtatcctggccctgcagccttttcccatccagccatctaccacccttatcagagggaagtgggtgactttggcttgacatgttttagctccatgggatgcctacctccttttctaacatagcaaaaactcttttccacgaacttttaaagatctttttataaggctgtttcaccttcatggtaattctactgcaaagcattagaaaaaaaagttaaagagactccagtgtgtgactacatgcagctaggaggcattttttatctcaatactctcggattcctttagaattcctcaaggtgccaaggtactaactttcagctctcattggaaatttgcctgaaaaacgggccacatcagttgagctggtattgggaaaggtctctgtgctgctgaatttgtgactaaatggagaagggaggggaagggaaaaggatatgatcccaacgtatgtttacaagagaaacaacaaaatccgcaattctcacttcctccctcctcccctgggaatagagtcggtttctcaccaagttcctgtgcagatgttggaatgtttcttgctctttgtggcggtactgggcatgtgatgggtaagactcattcctggtacaagtgatattttacatggattagggaatttccggaaggctgacttcctcttttgaaataacatttgctgatgtttttctgattataaacggactacatcccctttgtaggaaatgtggaaattagaggagaatgtgtaaaaagaagaaaatgaatgccggctatcacttccctgtccagagatataggcccgtgtgtgtagttcatttgcagacatgcacactcactcatgcacacatatgggaccggcaggagctggagaagtaaccacatggcgacttcatcttcctgttctgtgtctgaaggtgtccagtggctggttcttcctcagctcctgagtgagcatttgagcaatcagcatgaccttgctggaaactcttggatgacaccaagtcttgttgtcactgtaaatacccaacattgtcatcagtctgatgcttagagtatccagtcccagataatatcaaaactctgaacttgatttaaagtagagctgtttccccatcccctccagcttggtatcttgccacagagaactaggcctgggcttcttccctccctctgcctcctcccacagctcaccaggtgtggcctgacccctctgggagggagagaaggaggtaagtggctgtatagttcttatttcatggctgcaggctctgggggcaggcggaccctgtctcccggtggtggtgttcagggcccccttgggactgtcccagtgtgcatccccaggcttggtgaaacacccttttcagtggtcacgtgctgcctgcccggcaggctgtctcccagggctgctgtggctgaccgcctgtccagggggcctcgcaaggcagagtctgggctctcccacatgccagctctttcatggagaggtcgcagccattctcagcctgcacagagggtggatgagccggctgaacccacagctgcacccatctcttccactctcctgccagagccctgccctcactgcccaccaggagtctgaggcctctctttgagtgactcaggcctgagggggcccacacccctcccacaccagggaagagggtggtcttaaagctggaaagccccttatgtgtcctctcctctctacctcgttgtgggggattagtgttaagggcttctgtagcattctataaccacatttcagctaaatgcctgaagacacaagtcccctagggtatgtatctcacaattcactttatggcatgttatctgctgtctttttgcctcatcctgtcatacagaggctgcaaggctagatggattgaaagatcgatgtgtggatgggtgatggacggacagataataattagacaagaggacccttcagaagactttcttcttcctgatttgatttttgtctcctctttgggccatgagtactgcatggcctcttattgcttccttacctcctggccacatctattataaagaatccttttgagaaactcttcttcggttattttcacttgagtgtgctgtttcctattgggaccctaactgataaagataaataggtagatagacagacacacaggcagacagacagatagccatcaggtaacatggtaaaatttttaacagcatcaagcctggaatggaacttcttagattgtaaccctgggtaagataaccatcttgtttccacttcatcatatataaagtgaggatattaataatagtaatattaataatagtacctatttcatgaggttcttttaagaaatgaatgagaaaacacatgtaaagagaataaaacagtcctgggatgtggaaagcacccaagaaatactaacttttatcattctttttgcctcaaatatcataaacatttttacattaagatattttcaagtgcatcttgtataatagctgtgaaatattttgggagttgtaccataatttatttaaccatatcccccctttttttgaggcagagtgttgctctgtcacttaggctggaatacagcgacatgatctcggctcactgcaacctctgcctcctgggctccagcaagcctcccacttcagtctcccaagtagctgggactacacgtgtgccaccacacctggttaattttgttttgttttgtttgcagagacagggttttgccaagttgcccaggctggtcttggacccctgggcttaagcaatgcacctgcgtctccgcctcccaaagtgctgggattacaggtgtgagccaccgcgcccagcctaaccatatcccttattggaaatataggttgtttgtaattttccttcattttaaacaccataagtccccatccatatctggtcatttttttaggatagatccccatatgtggcctgccgaattgctttttgcaaccaactgtaaacaattgcagtcagttcccatccctgatgataattcatggtattcttagacaaattcataacattcctaccccagaaaacttgctgggtaaaaattagaatgagctgtttctacttgcatttattgggttataaggtgaggacttttgcgtgcgctttggtcatgtgtatgttgtgtgtgtacatattaccaccagaccattttctattgcggcgtatttcctattgatttgtttcagttctctctatattcagggtataatttttaacttaattatattttctgcaagttatcccagttgattttttcattttaactgtgttgtatttgctctctatattaaaatgaaatcacaggatagtctggggttggggtgactcagtattatcaaatgtacagagtattatgttgccggacaatcaggcactttacttctgcttttctttcccaaacaccagattatttctcagggctagaatctgagcctgctgcatactttctcataatttctataggtacttaagacgtgcatctggattttgctttgcaactaaacatataggaaggcttttcaatgattttcttaagttagaggagatgaagttgtcagaatctgttgttgacaataggaatttctagcctctaatactgcatttagatttggctgacttttccttttgtctcctgtcatttttcttttctttttctttttctttcttttttttttttttttttttgagatggagtctcactctgtcgcccgggctggggtgcagtggcgtgatctcggctcactgcaacctccacctcctgggttcacgccattctccagcctctggagtagctgggactacaggtgcccgctaccatgcccggcaatttttttttgtattttagtagagatgggattttaccatgttaaccaggatggtctcgatctcctgacctcgtgatctgcccacctcggcctcccaaagtgctgggattacaggcgtgagccaccgtgcctgtcgtctcctgtcatttttctcccgtacattttgattctccttccctgaaagaccctctgcatttggaggcatgatcgaggtgttaattgtgtcaaacttgccctgctcttttgtcttgcctccccctcatcccagcttgtgtggacttcctgcaggaagaggtagaacctggagccagaaaagaggaaaaatggttcacatttccatcaaatcccactgcttgggagctaattaaaaaaaaaaaaagaaagaaagagggatgcaacatgaaaccaagcagaagcaagggctgaatgattacggacagggtgtagagaaagaacagaagtaattacttgacagctccaaataccgtggcttccctgctctgtgttttgtaatttcttgatgatccaggatttccactctcaacatgcatgtcatggatgccacgcttgtcatgaacctcgctgattcggaaactagaccagacttctattggtcataagtgtaatgtcatggctctctaacaaagtgctgataaacaagatagcatttcactaatcaaacccagaaagtgaaaacaaattaggcaaacaaatggataataaaaagtgaaaatggggtctggcttccaagatggccgaataggaacagctcctatctgcagctctcagtgagatcgacgcagaaagacaggtgatttctgcatatccaactgaggttcctggttcatcttgttgggactggttggacagtgggtgcagcccaccgagggcaagctgaagcagggtggggtgtcgcctcaccaggaagctcaagatgtcgggggatatccctttcctagccaagggaagccatgacagactgtacctggaaaaacagttcactcctgcccaaatactgcacttctcccaaggtcttagcaactgtcagaccaggagattccctcctgtgcctggctcagtgggtcccatgcccatggagccttgctccctgctagtgcagcagcagtctgagatcgacctgcgaggatgcggccaggtggggggtggggcggggcatcggccattgctgaggcttgagtacgtaaacaaagtagctgggaagctcgaactggatgcagcccactgcagtgcaacaagccctactgcctctatggactccacctctgtgggcagggcatagctgaacaaaaggcagcagacaacttctgcagacttaaacgtccctgtctgacagctctgaagaaagccgtggttctcccagcacagcattcaagctctgagaacggacagactgcctccttaagtggatccctgacccccacgtagcctgactgggagacacctcccagttgcatccaacagacacctcatatggtgggtgcccctctgggacaaagcttccagaggaaggattaggcagcaatatttgctattctgtgatatttgctgttctgcagcctctgctggtgataccctggcaaacggggtctggagtggacctccagcaaactccaacagacctgcagctgaggggcctgactgttagaaggaaaactaacaaacagaaaggaataacatgaacatcaacaaaaaggacatccacaccaaaaccccatctgtaggtcaccaacatcaaagaccaaaggtagataaaatcacaaagatggggagaaaccagagcagaaaagctgaaaattccgaaaaccagagtgcctcttctcctccaaaggattgcagctcctcgccagcaacggaacaaaactggacggagaatgactttgacgatttgacagaaataggcttcagaaggtcggtaataacaaacttctccaagctaaaggaggatgtttgaacccattgctaggaagctaaaaaccttgaaaaaaggttagacgaatggctaactagaataaacagtgtagagaaggccataagggacctgatggagctgaaaaccgtggcacgagaactttgtgatgcatacacaagcttcaatagccaattcgatcaagtggaagaaaggatatcaatgattgaagatcaaattaatgaaataaagtgaaaagacaagattagagaaaaaagagtaacaagaaatgaacaaagccgccaagaaatatgggactatgtgaaaagataaaatctgtgttgattgatgtacctgaaagtgatggagagaatggggaaccaagttagaaaacactcttcaggatattatccaggagaacttctccaacccagcaaggcaggccaacattcaaattcaggaaatacagagaataccacaaagatacttctcaaaaagagcaacccaagacacttaattgtcagattcaccaaggttgaaatgaaggaaaaagtgttaagggcagacagagagaaaggtcgagttacccacaaagggaagcccatcagactaacagcagatctctcgggagaaaccctacaagccagaagagagtgggggccaatattaaacattcttaaaggaaagaattttcaacccagaatttcatatccagccaaactcagcttcataagtgaaggagaaataaaatcctttacagacaagcaaatgctgagagattttgtcaccacgaggcctgtcttacaagagctcctgaaggaagcataaacttggaaacaaacagccgataccagtcactgcaaaaacttgccaaattgtaaagaccatcaatgccatgtagaaactgcatcaattagtgggcaaaataaccagctaacgtcataatgacaggatcaaattcacacataacaatattaaccttaaatgtaaatggactaaatgcccccattaaaggacacagactggcaaattggataaagaatcatggcccatcagtgtgctgtattcaggagacccatctcatgtgcagagacacaggtaggctcaaaataaggggatggaggaagatctaccaagcaaatgcaaagcgaaaaaaaagcaggggttgcaatccttgtctctgagaaaacagactttaaaccaacaaagatcaaaagagacaaagaaggccattacataatggtaaagggatcaattcaacaagaagagctaactgtcttaaatatatatgcacccaatacaggagcacccagattcataaagcaagtccttagagacctacaaagagacttagactcccacacactaataatgggagacttttaacaccccactgtcaactttagacagatcaatgagctagaaggttaacaaggatatctgggacctaaactcagctctgcaccaagcagacctaatagacatctacagaactctccagcccaaatcaacagaatatacattcttctcagcaccacatcacacttattctaaaattgatcacataattggaagtaaagcactcctcagcaaatgtaaaagaacagaaatcataacaaactgtctctcagaccacagtgcaatcaaattagaactcaggaataagaaactcactcaaaattgcacagctacatggaaactgaacaacctgctcctgaatgactactggataaataaaaaaatgaaggcagaaatagagatgttctttttgaaaccaatgagaacaaagacacaatgtaccagaatctctgggacacatttaaagtgtgcgtagagggaaatttatagcactaaatgcccacaagagaaagcaggaaagatctaaaatcgacaccctaacatcacaattaaaagaactagagaagcaagagtaaacaaattcaaaagctagcaaaaggcaagaaatatctaagatcagagcagaactgaaggagatagagacacaaaaaacccttcaaaaaaatcaatgaatccaagagctggttttttgaaaagatcaacaaaattgatagaccgctagcaagactaataaagaagaaaggagagaagaatcaaatagatgcaataaacaatgataaaggggatatcatcaccgatcccacagaaatacaaactaccgtcagagaatagtataaacacctctacgcaaataaactagaaaatctagaagaaatggataaattcctggacacataccccctcccaagactaaaccaggaagaagttgaatctctgaataataggttctgaaattgaggcaataattattggcctaccaaccaaaaaaagtccagaaccagatggattctacagccaaattctaccagaggtacaaaaaggagctggtaccattccttctgaaactattccaatcaatagaaaaagggaatcttccctaactcattttatgaggccatcatcatcctgataccaaagcctggcagagacataacaaaaaaaaagagaattttagaccaatatccctgatgaacatcgatacgaaaatcctcaataaaatactggcaaaccgaatccagtagcacatcaaaaagcttatccactatgatcaagtcggcttcatccctgggctgcaaggctggttcaacatacgcaaatcaataaatgtaacccatcacataaacagaaccaacgacaaaaccacatgattatctcaatagatgcagaaaaggcctttggcaaaattcaacagccattcatgctaaaaactctcaataaactaggtattgatggaacgtatctcaaaataagaagagctatttatgacaaatccacagccaatatcatactgaatgggcaaaaagtggaagcattccctttgaaaagcggcacaagacaaggatgccctctctcaccactcctattcaacatagtgttggaagttctggctaggacaatcaggcaagagaaagaaataaagggtattcaattaggaaaagaggaagtcaaattatccctgtttgcagatgacatgattgtatatttagaaaaccccatcttctcagcccaaaatctccttaagctgataagcaacttcagcaaagtctcaggatacaaaatcaatgtacaaaaattacaagcattcctatacaccaattacagacagagagccaaatcatgagtgaactcccatacacaattgctacaaagagaataaaatacctaggaatacaacttataagggatgtgaaggacctcttcaaggagaactacaaaccactgctctaggaaataaaagaggacacaaacaaatggaagaacgttctatgctcatagataggaagaatcaatatcgtgaaaatggccatactgcccaaggtaatttatagattcaatgccatccccatcaagctaccaatgactttcttcacagaattggaaaaaactactttaaagttcatatggaaccataaaggagcctgcatagccaagataatcctaggccaaaagaacaaagctggaggcatcacactacctgacttcaaactatactacaaggctacagtaaccaaaacagcatggtactggtaccaaaacagagatatagaccaatggaccagaacagaggcctcagaaataacaccacacatctacaaccatctgatctttgacaaacctgacaaaaacaagcaatggggaaagcattccctatttaataaatgttgctatgaaaactggctaaccatatgtagaaagctgaagctggatcccttccttacaccttatacaaaaattaactcaagatggattaaagacttatatgtaagacctaaaacgataaaaaccatagaagaaaacctaggcaagccaggcatggtggctcacacctgtaatcccagcactttaggaggctgaggtgggtggatcgtctgaggtcaggagttcgagaacagcctggccaacatagtgaaaccccgtctctactaaaaaatacaaaaaattagctgagtgtggtggcgggtgcctataatcccagctactcaggaagctgaggcagcagaatcgcttgaacctgggaggcggaggtagcaatgagctgagattgtgccattgcactccacggcaacaagagtgaaactctgtctcaaaaaaaaaaagaaaaaagaaaaagaaaacctaggcaataccactcaggacataggcatgggcaaagacttcatgactaaaacaccaaaagcaatggcaacaaaagccaaaattgacaaatgggatctaattaaactaaagagcttctgcacagcaaaagaaactatcatcagagtgaacaagcaatctacagaatgggagaaaatttttacaatctacccatctgacaaagggctaatatccagaatctacaaataacttaaacaaatttacaagaaaaaaacaaacaaccccatcaaaaagtgggtaaagggtatgaacagactcttctcaaaagaagacatttatgcagccaacagacacatgaaaaaatgctcatcatcactggttatcagagaaatgcaaatcaaaaccacaatgagatatcatcttacgctggttagaataacgatcattaaaaagtcaggaaacagcagatgctggagaggatgtggagaaataggaatgcttttacactgttggtgggagtgtatattagttcaaccattgtggaagacagtgtggtgcttcctcaaggttctagaactagaaataccatttgacccagcgatcccattactgggtatatacccaaaggattataaatcattctactataaagacacatgcacacatatgtttattatagcactattcacaatagcaaagacttgaaaccaacccatatgaccatcaatgatagactggattaggaaaatgtgacacatatacaccatggaatactatgcagccataaaaaagatgagttcatgtcctttgcagggacatggatgatgctggaaaccatcattctcagcaaactatcacaaggacagaaaaccaaacactgcatgttctcactcataggtgggaattgaacaatgagagcacatgaacacagggaggggaacatcacacaccggggcctgtcgggggtggggggctggggcagtgatagcattaggagaaatacctaatgtaaatgacaagttgatgggtgcagcaaaccaacatggcacatgtatacgtacgtaacaaacctgcatgttgtgcacatgtaccctagaacttaaagtacaataataatttaaaaagtgaaaatgactatcacattagaaaaagaggaaaatggtaaaattatagcattctcacaggttggactatgatgccaacctgtgagcccaattataactatgtttcataattctctgcttccagagaattttttatgacaaggggaaatatccgtggcataatgttgagggaagaaagtagaatgcaaaactgtagacatgcaagttgtgtgatgccaggtattaaatatgaaacacagagaacgcttacacatattggggctttgaaaaaaagactggaagaaattacattgagggttttttgttttgttttgtttttgagaccgagtttcacccttgtcacctaggctagagtgcgatgcactctcagctcactgcaacctctgcctcctgggttcatgcccggctaatttttgtatttttagtagagacgggttttcaccatgttgaccaggctgatctcaaactcctgacctcaggtgatctgtccatcgtggcctcccaaagtgctgggattacaggcatgagtcaccatgcctggccaacatcgagatttaaatggcattttctccaagtgatatgttttctttttttctctctttttatttatttatttttttttgagacagagtcttgctctgtcacccaggctggagtgcagtggcatgatcttggctcactgcaacctccacctccttggttccagtgattctcctgcctcagcctccagagtagctgggactacaggtgtgtgccaccatgcctggctaagtttgtttgtttgttttgagatggagtctcgctctgtcaccaggatggagtgcagtggtgcgatctcggctcactgcaacctccacctcccaggttcagcctccctagtagcttcctgcctcagcctcctgagtagctgggactacaggcacatgttaccacgcccagctaatttttgtatttttagcagagacggggtttcaccatgttggccaggatggtctcaatctcttgacctcatgattcgcctgcctcagcctcccaaagtgctgggattacaggcgtgagccaccatgcccagcctttgtatttgtagtagagaccaggttgtagagacagggtttcaccatgttggccaggctggttttgaactcctgacctcaagtgattggcctgcctcagcctcccaaagtgttggcattacaggcaggagccaccgtgcctggcctccaagtggtatgttttctttttgacacctgtctaatttttttcccccaaaatttcatttacatttattttctttattgttaccttattactttattattatatttattttctttattgtttgcttattagaaaagaggaaaaggaatatcatttaaatattgtaagataaaaaattggaagtttgtttctaagttttcaagttgcaactttaaatctggcttattcttttagcttgtgagattggtttttccggaccttggcacccggaggctgggcactagaggaagtgccaggtaggtttagaatttttgttttatttcaaatgttaaaaacaaggatttggaaaatcacaaaatgaatgataaaaaatgcaaaacaaaacaaactataaataacaactcttaccaaagagtgtccacaattcgcattaattcccagtgcctgaaatcattgagttggtgctagaaccaaacactggcctctattttcttcggaattttgttaaaatatgaaggttacaatatatttttattgttctacagttaggtaaatgtctcattcttgaaatatttaaataattaacacacatcaaataatgcaactgttgcccaggctggagtgcaatgctgcaatcgttgctcactgcagcctgaagcccctgggctcaagcagtccttccacttcagcctcctgagtagctaggactgcaggtgtgtcccaccaggcctggctagtttttcatgttttttagagacgaggttttcctaaattgcccaggtgggtctcaaactcctgggctcaaatgatcctcccactttggcctcccaaagcactgggattacgggcgtgagccaccacgtccggccttggagctgttttaattaccctttgaactaaagtttctgtgttcacaaaattagcatatttgaattatattccggaggtgcggtcccgaggctatattacttttctttttttttttttttttgagacggagtttcacccttgtcgcccaggctggagtgcaatggcgtgatcatggctcactgcaacctccgcctcccagattcaagcgattctcctgcctcagcctcccgagtagctgggattacaggcgcctgccaccacgcccggcttattttttgtatttttagtagatacaggattttatcatgttggccaggctggtctcaaactcctgacctcagatgatccacccgtctcagcctcccaaagtgctgagattacaggcgtgagccaccgcgcccagccccaaggttgtatttctaacgtgaaaagaaattccagtattatcgagtgccttgtgtcataattgtcactcaattattattgctatttgttgcttgttttaaattgcgaggggaaatcagcgagaagacattgaagccaaattaggaaagggggctgccactcaccaaggaattgaagacagtggaagtgtttgccaaacctaatattgggcaataattaactagaaaaaattttgtctgaagccgggacaagctgctatagtcccctgggcttagcggaggaaggtgtgggctgcagagaaggctcttggcttccctcctgggtttctgacaacttcagtggagggagccttggtatcattttcccttcacctgaaaaaggttaatgggtgctggggggtcggggggcagtggttgagggcacagggcagggaacaggaggctttccctatcacatctctctaagattagtgtgtgctgcatcaggcaagcagaggagagcctccacaagcctatttcaaggctgatatgtgtgaaagtgtatgaagttgcctgtctacataacagagcttggtcagactgaaggattagcttttccagagaaatgcagccaatgctaaaacctggagaagaactccaagtcttcattagttcgcctattctctgccttccataaagcatgtcagtagttagacataaatttaaagacaacctttatttttccaggtatcattatgatggaatctgtatcaagaaaagctctttcttctatgcccagtattgctacctgataggtgaaaaaaggtatcacaggttagtagctatcattttggcactttggtcttgggtcacaagcctggtgaatgttagaaccattcaggccaagtgtggtggctcacgcctgtaatcccaacactttgggaggctggggcacaagaaccgcttgagttgagttcagtagttcaagaccagcctgggcaacatggcaaatctccatctctactaaaaaatacaaaagttagccaggcatggtgttgtgcaccggtagtgtcagctactcgagaggctgaggtgggaggatcacctgagcctgacaaggtccaggctgcagtgagccgtgattgcgtcactgcattccagcctgggtgacagagtgagaccctgtctcaaaatagtaataataataataaattaataaataaaagaaccattcatattttagttgtatctaactgactttttggttgttctgtctttaagtcctccttaaggaaacacacatatcacatcaacatttaaccaatgtccctttgtcagcctctggcaatgtcattggccagagaaatccatttctggttcatttccttagacatttctcattttgagtgtcatccagttgccaaagccatttttcgctgagtctatccttctcaacctttctgcaaaatttgacacaattgggcacctctctcaaagcttcctttagccctcaggactgtgtcatccaacccccaccagccctgaatccttggtctcctgctctttcccttctccattaagcttaggctctccccgagatctcatcttgataatcgccattactcttcctactgtttggccccagacatctcatccttttttgtctttcacctatggcctcctgcaggtggatgactcctgaatccttctcactggtcctgaccttgcccacctcctaggcattcctccctggctctctactggacatttccacttcgatgacccactggtacctcacactcaacatatggaaatctaaatttagcctcttcctccagattgtctctgccccttgattttcttagttcaatcttgataccaacagatagaacctatacaaagtgtcaccccaaagccacccctgacccccgtgggtcacaaagccttgttaacttttctctttaagttctcctgaactcactctttttggtaacccatatctcctttaatcctttgtcatcttacactgaaattatttccagtgatcccatatggccttcccctcctcagcctctccctgctctaaacacagctaccagatgaatcctcctaaaattctacatttgctttgtctctttcctgctcagaaacacgtgagtgcttgttcttacctcctggataaaggccaaccctaggctggtgttagccaagtttcttctgactccactttccaaccgtgtgttgcctatttctccccaatatcaaccataatttaagccacactcacttttccctgaacatatcaaatgcagtccacctttgctcccaccatccaaccttccatagtgccatttcttcttgtctctgtctaatgggaccttcctgaataccatccataccttctggacatacctcagagaccacctgccccatgggaccatccccaacaatgccagctacaggaaagttctttcttccacttcttcatgctgaccactgtccatccatacaaccagcattcctgctctttgagccttctttggcataaaaagatgaccatatgtccaaatagccaaggacaatatcaatttcacttggagccctgcataattattaattgtgcttctttcactctcaaaggtgttctagtttgaacaataaattaaaatgaattatatggtcacctttggtataaagcatcctatgtatgaggcagctgctgtggtagagagatgaggagcctccagtatgggtaagacagggacccttttctctgatagctgaagagggaggctaagatgtccatttactttgatcctcaaatataatatgacgagtgtcagaaatgtacaaaaggtaccataagaactcaaagatgtgcagcacacattttgggtaggggatcatgaagggcctacaagggcgttgggctttgagtgaagcaatgaagaacagattagaattttgacaggtggtgtcggagaaggaggcaggagtgcagaggacatccaggcttaggggagcaaagataaaagtacatgaaggcatgggcttcgtcctgtacaggcatgcatggagctctagtagaagaatatgaatctggagggaaagttcagggggcctagattaccaggctgggcagtggagggtgtccacaagtcctttggaggcttcctttgagaaatagggtggaatatccacaagggcagaaaccatggagctttgtttgtttctgtcctgctgtggtttgaatgtttgtgtccttccaaaattcacactgaacctgatccccaatgcaacaatcttaagaggtggggcctttccaagatgattaggccatgaagcctccaccctcatgaatgggattaataaccttataaaagaggcttcagagagctagctggccctttcgtctcttctgccatgtgagggcacagtgttcatctctgtcatccttctgccttctgccatgtgaggatgtagcaacaaggtaccatcttagaagccaagagcaagaactggaggttgttatgttaagttaaataagccagacacgaaagacaaatattgcgtgttctcactcataggagagagctaaaataagtttatcttgtggaggcaagagtagaatagtggttaccagaggctggagagaatagggaggaatgaaagatgggttaatgattaatggatatcaacatatggttagacagaaagaataagttctagtatttgatagcccagtagggtgactatagttaatgatatattatgtgatatattatgtatttcaaaatatctagaagatttgaaatgttcccaacacaaagaaataataagtgtttaaggtaacggatatgctaaacaccctgatgcatgtatcacaatatcacatgtaccccataaatgtatacaattagtatgttaaaaaagaagaagaagcagcaaagagcaaacttttaccagacaccaaatctgcccgcaccatgatcttggacttctcattctccagaactgtgagaaataaacttcttttgtttataaagtacccagtctaaggtattttgttacagctgcaggaacaaggacatattcccagagtgggcactgaaatagctattggagaactgaaaattcagccttgcggtttaagaatagttgggaaaggagagggtgatgagcctggagatggccccagggctgctgccgttgttcagatttgcactggaatcagacaggaggcaggtctgagagacctcttagaggcagggtcttcaggatctggcagttggttgagtcagtgtagtagaagggagcagagatgattcagtcaagcctgtcccacctaaacctcaaactcaacctcaaataaagtcactgtgctctgcgccaaaccagctcttcctcttacatctcttattcatctcttagtcacggggatggaaaagttacattggcaaaaatagagaagctaggaaaaggaatagctataatgagagatttattttagtgactgttagaatgtccctggtgcgaatttgttctctcacttgctgatctgtaggctcctgaaaggctgggtgtagatcctgcattccattgtgtgcccccccacccccaccccctggcacctagcagtcagttaactaacagacaatttggagagccctgcatgctccaggaaaacaagtaactaggcaggcactcggcactcagaggggagagaccattagcgtcccggggactctgtttgtttccgatgtcacagagagaggggctaggagtgtcctttgtgggggaaggaagataggctttatcatcggtgaggaagaggaggactgctagaggacaaagataaaggcaagagtgacatcggctggtcatgagataaggccagcaacaggtgcttttcatgtactctatgctcagcatatacttaataattgatcaacttggctgggagcggtggctcaggcctgtaatcccagcactttgggagaccaaggcgagtggatcacgaggtcaggagatcgagaccagcctggccaacatactgaagccccatctctaccacaaatacaaaaattagccaggtgtggtggcacgtgcctgtagtcccagctacttgggaggctgaggcagcagaatcgcttgaacctgggaggtggaggctgcaatgagctgagatcacgccactgcactccagcctgggtgacagagtgagacaccatctcaaaaagaataacaaaaaacaaaaacaaacaaaagtaatagatcaactttaaagtcttggccaactaagaaattttttttttaaagcattaagatttaaggataacttcactgccaatgccacgttcagaacatacaaaagtgtattttagaaagcacaagtgtaagaaatggtacactgttgttaatgagctgtactgatgaaaagtgtctattttattatataaggacctgtgtgacaaattcctcttaaaaattaggtctcaaaataaataagtttatctctctggttttcaggtaatgaaaactctataactcatctgccatttacttatttgttcattcatttgagttcctacaataagtcaggcctgttctagctactggtgatatagcagtgaataagataaacaaggtctctccttttattagcttagttaggaaaaaagaataaaaaaggacaatagaccaggcatagtggctcctgcctgtaatcccagcactttgggaggccaacatgggcagattgtttgagttcaggagttcgagaccagcctgggcaataaagcaagaccctcatctcttcaaaaaatataaaattaaaaattttatatttaatatatatttatatataactattagctgggcatggtggtgcacttgcggtcccagctattcaggaagctgaggtgggagagtaacctgagcccgggaggtcaaggctgcagtgagctatgatcacgccactgcactccagcctgggctacagagcaagaccctgtctcaaaaaaaaaggaacaatcgcgagatgtggcctgaagacaatacaatggagtcatggagaggcctccctgagacaacaccatttgaacagagtgccagtcaaggagccaagtgaagatctggaacaagcattccaggcagaggaaagggctgtgcaaaaggcctgaggcagagattagttcaaggagcaagaaagtctgagggtggacttcagtgggtgagcaggagggtgggaggagaggaacctgaacacagaggtgaggtagaggttagagagactagggagaggcttttgtggcagccctggaagaaacagcccattgagatgaatgacttaaataactttaattctcccaagaagcagcagcacactatgcaatactacatgtggataagagcagatactggaacagactgcctggctctaccactagtaagctgtgtgatcttaggcaggtcactcaatctctctgtgtctcagtttcctcatccattaattaaggataacagtatctacttcatgggactgttgtgagattacattaattaatacagggaaaatgcttagtgcagcatctggcacacagtaaacattcagtagggcttctaagcatattgatctgtactttgatgtatttattttatcaagtctgcatgattttttcatggtattcatatattatttttactctagttattgtatttttcagttgcataatttccacttgattcttttgtatgacttatatgactttgctgaggttttcaattttttcatttgtttcaagagaattcacaattatttgttggagcatttttataatgactgcttgaaaatccttgtcagataattcaacatctgattcgcctcagtcttggcatcagttgattgtcttttctcattcaaatggtgacttacctggtctttgggattatgggtgagtttccattgtatcctgggaattttggttatgttaggagactcttgatcctatttaaatcttctgttttagacagaaggcagttgccctgtttaggtttagtgtgtaggttctggcctacttttatgggctgtgggtccaatgccagctcagtttcctgagcctttgcatgctattcttgtctgcttcattcttctggcactgctgagatttctgattaatccctagtggtgccacctgcaggggctcaacccacttccatggaccactttctgtggagagtggggagagccagagtgtctgggcctgggtctccttatgccccttggtgtaaggagggaggcatcaggctctgccaatgttgtcatgtggggagcatgacctgccatttcagtgctccacacatggaatgggcattgaattgacccacggcttcactactgtgcatgcaggtggagagtagtgacgctacatacacatacccagagcactggcaggcaggctgatcctgatccggactgccagtgctctgggtgtgggtgtatggagcgtggaggtcagtctaccagaactctgaagctgctactgtgggcagatgggtcaccagtgcatgccctggttgtggaaagagggttgcagccccctactaggtctccactggacttcccttccctttcctagtcctttggccagagtgcaggcttttctttggattttatgcctacacctattgacgtaacagactgtgttgcacatttctccagtgctcagtccaggggtgtgtggaagacaaaaagaaaacccagggaacccaccacattgtcatttctctactcctgtcgtctctacccagtctaccttcttctttcccgctttcagagctcttctatccttgtctgtagaataatttccaaatatgtagttgtattagaggcaggaaaggaaggtgaatctacaccaccttgttccctgtacatgatttgtaatacaagctaccacagatactttttgaaaacaaaccatatatacattaggaaccaatattactagtgagtggaatgcctgattatatgattgtgcctaatacttcaaaatatgatcagtcaaaatacgatggtggagacttctggttgggacaagatgaacctatttctccatgcccctccacactaagcacaactgtaaaccctggaaataatgcaagaggcaaccaaaggaaaactccgaaaggtggtgataagagagtgagctggtttgggacccaggactgtacaatcagcaccgcagcagagcatcttgcatcccccgccctgcaccctgaaacccagactcaatgtttcccaagcctgacgtaggaaaagaaggcaacccaggtagattcattcttccttccttgagttgctctaataatatcaggcaaaataattttgggggtggttaatagagaaaatactctccttccttcctgggtctgagacaccccttttctaccaagagatactgagggtgtgagccgatctgcctagagagacccagcttcaacaagcctcttggtccaggaagcctctttgttctgcagcctgactgacactcttccgctccccagaggccgccaggagcatcagtaggaggagcacctccctcatggagagaagtcccaaggtctagcctggggaaacccttctccctcctcaggtagcaccagcaggaaccagtgggaggcccagaggcaccagaaaaaccaagcaggctgaaacaacaccacaaaggctctgaaaattaagcttttgaaaacaaaaaacaaaggaaaaataaaaccctggaagcaggcagaaaaataacacattacctataacagtgatttgaatggcaacacatttatcattgaaaccaccaagaaagccagaaggaagtggcacaaaaggtttcaagggctgagataagaactgtcaaccacaatttctacatccagcaaatttattttcaggaatgaaagggaaataaaaatattcccaggcaaagaaaaaccaaaaaaatttgccactagctgactcacccttagagatcagctaaagaaagtttttcaaagagaaaggaaatgataatagaaggaatgttggagtatcagaagagaaaaaacaatgggaagagcagaaatatgggatacatacaatacactgtcctttgcatcacaagttctatgaatcatgtttgatgaaacaaaaatcaggcctccatctggtacttgagacaatgatatttaaaagtggggaaggtaaagaggcctaaatggaaaaaagatttccacacctcactcaaagtagtgaaacatcaccaccaacagactgtggtaagtcacgtgtgtctattgtaatactcatgtgaccactatgagaactataccaagagatgtactcaaaaatactacaattaaatcaagatagagtcctcaacgttgtttaatcctcagaaaggcaagaaaagagaaatagaagaagaagaaccaaaggaaacaaatagaaaacaagtaataaaatggcagacttaagtgctaacataccaagaattcccttaaatgtaaattatcttatataatcagccaaaagacaagactggcagagtgaatttaaaaagaaaaaaatgactcaagtatgtacttttgccaagaaactcacttcaaattcagtgacataggcaggttgaaagtaaatggatggaaaagatgtaacatgcaaacattaatccacagatagcaggagtggctatgttcatatctaataaagcagacttcagagcaaagaaaattactagggacaaaaagggactgacttagtccattttctgttgcttataacaggatacctgaaactaggtaatttatgaggaaaatgaatttatttcttacagttatgaaggctgagaagtctaagttcaaggggccacatccagtgagggccttcttgctgacagggaccctctacagagtcccgaggtggcccaagacatcacatggcaagggggctgagtgtgctggctcaggtctcttcctcttttacaaagccaccagtctcattcccatgataacccattaatccatgaatccatgaattcttaagggcagggccctcaagaccaaatcacctacctcttaaaggcctcacctctcaatactgccacattgaggattaaatttcaacacaagggctgggcgcagtggctcacgcctgtaatcccagcactttgggaggccgaggcaggcggatcatgaggtcagaagatcaagaccatcctggctaacacggtgaaaccccgtctgtactaaaaatacaaaaacaaaattagccggccgtggtggcgggcgcctgtagtcccggctactcggaaggctgaggcaggagaatggcatgaacctgggaggcagagcttgcagtgagccaagatcgtgccactgcactccagcctgggcgacagagcaagactctgtctcaaaaaaaaaaaaaaaaaatttcaacatgggtttcagaggggacaaatattcaaaccataacaaggaccttatataaggataaaaggatcaatcccccaggaagacataaccatcctaaatgtatgcacactgaacaatcaaactgccctttctttttctcgagtaacgctggagccgtacttcagtgaattcaggttattctagcaaatctcaccactgcgctagggatctccaagaccacctccacttgcagagatccagtagaaggactcacaggacttagcatttaattgtacgcatggctaagatttatgacagtgacacagtaaagatacccaggatcatgatggaaaaagaggcagagtctggtggaacccttgtgaggcttcctgtgtgctctcccctcccccatgagggatcatacaaagttcactcctcccccagcaatgaaatgcagcaacatgtgtttgaggtttcttcccagggaagcccgttagcgactcggcacctaaagtttttattgaaagctggtcacataagcaccctatgtctagcacatgccaacattatagactcctaaaaggaaagcaggtgttcagcataaaccatattgtttgtacagtctaggcacagggagccactcttatcagctaacggttgactgggaacactccaagagccaagttcccagaccctagccgagggccaaacttggcagcagagctttctacgagagcagtctcaggcctgcagtgttatctcttttctgcacagctgcataaccctgtggatatgctttaaaaaaaacattgacttggactctttaaacgggtgaattgtatggtatatgaattatctctcaatgagtttttttttaaaatctcagcaagattttcttgtagacatagacaagcgtcttctaaaaagttatatggaaaagcaaattgctcaaacaaacttgatgaaaaggaataaaatgggaggagaacactctcccttatattaaggctcactgtatagccacagcaatcaggatggggtggtactggtgacggcatggacacaccgatcactggaactgagtggaggatacagaaatagatccgctcggctatgcgcggtggctcacacctgtcattctagcatgtcgggaggccgacaggagaatcgcttgaacccaggaggtggaggttgcagtaagccaagattgtgccattgaactccagcctgggtgacaaaagtgaaactccatctcaaaaaaaaaaaaatctacttaaatatgttccactgatttttgacaaaggtacaaaattaattccatgaaaggggctgcttttcaacaactggtgctggaacaattagaaacccacaggcaaaaaaaaaaaaatgaacttcaatctaatcttcataatgtatatgaaaattaactcataatgtatatgaaaattaactcaaaatggatcgtagacttaaatttaaaacataatattaaactttaaaaaccttggacaaaatcactgggacttgcacacaaaaggtctcagaccagacaccagaagtatgatccataaaaagaaaatgtaaagttggaccacatcaaaatcaaaacttttgctcttagaaagcccatgtgaagaggagggaaagacaagctacaaatgggaagaaaacatttgcaaaccacataactgaccaaggactagtatctagaatatagaaagaaggctcaaaagtcaacagtaaaagaaacaaacaatccaattagaaaatgggcaaaagacataaacatacgataaagcaattgtaaataagcacatgaagggacactcagtccattagtcactgtggaaatacaaattaaaaccacaatgaggccgggcgtggtggctcacacctgtaatcccagcactttgggagactgaggcaggtggatcacctgaggtcaggagttcaagaccagcctgaccaacatagtgaaaccctgtctctactaaaaatataaaaaattagcctggcatggtggcgggcgcctgtaatcccagctactctggaggctgagccaggagaatcgcttgaacccaggaggcagaagttgcagtgagccaagattacgccattgcactccagcctgggcaacaagagcgaaactccgtctcaaaaagaaagaaataaataaaacataaaaccacaatgagatgtcactacacacctaccagattgactaaaataaaaagtagtgacagcacccaatgccagcaaggatgtagagaagctaggtcactcacacaatgggaaggtaaaatggtctagccactctgaaatacagtttggcagtttcttattaaaccaaacatacaatttaccacccaaaccagcaactgcaccttgggcatttattccagaggcatgagaacttatatccacacagaaacttgcacacaaacattcatagcaagtttaagtgtaatagcccaaaactggaatcagcctagatgtccttcattaggtgactgtaaataaactatgatccatccatactgtggaacactactcaacaataaagaggtataaactattatttggaagcaatctaagtgtctatcaactgatgaatggataaagaaaatgtggtacatatacacagtggagtactattcagctgtaaaatagaatgagatcctgtcatttgcaacaacatacataatgaataagatctaatattcactagcacaacagctgatgatagtcaataataatttaattgtatattaaaaaaataaaagtataatggtattgtttgtaacacaaatgataaatgcttgaagtggtcgataccccatttatcccaatgtgattattacacattgcctatatcaaaatatcttatgaactccataaatatatacacctactatgtacccacaaaaattaaaattaaaaaaaaagaggaacaaactattgacacacaacttgaatgaatctccagggaattttgctgagtggaaaaaactccaatcccaaaaagttatatagcatatgagtccatttataaaatattttgaaatgacgtagggatgggggaagcaagagatgaatgtggttgtttgtggtggtggatacatgaacctgcacaggtgatacgattgtgtagaaataaatatacacacaaatgaatttaagtaaaacttggggaatttaagtaaaacttgggaaatttaagatcagcagagtgtatcaacgtcagtatctgggttgtgatattataccacagtttttgtaaaatgtaaccatcgggggaaactaaacagggtgtaaaagagatctctctgaattatttctttccttccttccttctttcttttcttttctcttcctttctcttttttttcctttttttcttttcttttttttgaaacacctgttgcccaggctggagtgtggtcacgtggcatgatcatggctcactgcagccttgaccgcctaggctcaaatgatcctcccgcctcagcctcctgagtagctgagatcacaggcaggcaccatcatacctggctatttttttgttttgtttttttgtagagacagggtcttgttgtgttgtccacactggtcttgaactcctggcctcaagggatcctcctgcctcagtctcccaagtagctggcgacagttgggagtcactgcacttggctaattatttttattttttttgtaagagacgggtcttattgtgttgcccaggctgggcaactcctgggcttaagtgatgctcctgcctcagcctcccaaagtgctgagattacaggcgtgagccactgcacccagcctgaattatttcttacaactgcatgtaaatctacaattatcttcataagaatttcaattaaaaataataaatcaaggagaatcctataattcaggaaaagacatcatgacaggccccatgaagtatcccacagccctttcctgcccatttcttggagggtccgaggtctcagggtttcttccgctgacacccattctctcttctcatggttggagtgcgactccttcctttctttcaaagcactctcctggcattttcatctgtgcacacagttgcttttcctctggacgcacaggcatcgttgcctttaacagaaccagagcagggctccttagcagaaggaggtcagcggccaacagaggaccagagcgctgcccccctggaggtggtcagtccccatggtgtgcagctgtgtgtgctcagggtgcgttctcacacacgacttttacgaatgccatctctattgtgtttaaaacccagaagcgagctctctagcaaacctatgatgagtatgttggtctttccccaatgttttatgcctgggtgaagcagccatttctctatgtgtgcagcaattgaggagtgatttacaaaaactctcctactagtatttgcctaagggaggaactggaatttcattttggttgggggtgagggtggttaaaaagagcacgccttgctaggaccatcttagagtagaacatacaagctctcccaaatcagttctcagagtcactgagctgtgcacaggctgttcaagggcatctcaattgtctttatctcttctttctggacctcgtgttaaggaaaggaatggaaacaccaataagagcattgtcgtagagagatttggccatgaaccaggattgtagcaaaggggcgacttctctcactaccaccaagtactccaaagaagcatagaatctaattaaaataaatgtagtctcaagataagcccttatctcctccctattgcttctatattgccccctaagccctgtaaatttagaaattctgattcccaggtccctgaacctgcacatcccgctcctccctccacacccgtctgctggggaggggagaagagggtgcccacagatgcagcaggggggtcgtgacagagccgggaaccagggcgctggtggcccacttaactggacacctggagaggtggctgagcagcgggtgggggcgttcgttttcactggggtgggatgggaattgtggtgaatcgtgctgaaaaatgcagaggcagcatccgtcctcaccaaggagagaccaaggtttgatttttaaaacaaatgaacagcttgaggctatttttttaaatgaaaatgaccataaatgtgcaatgtgtgccatatgaacaagaccacctcacaaagtccagcacattccccctcccttcctgctcccctatcagggcagaatggcctccccagattccaatcccgtttagttggcaaccagattgaggcttggacctgggtataattgctgactcagaaattcagggaagaatccaagccaaagtataaaatattttattattgtctaggggaacaggggagtggagaatgtgtgtgtgtatgtgtgagtacgtgtgtatatgtgcgtgcattatatcacatctggagaaacagctctttgtaattaacctttattctctacctcttaggcaaaatccctgggttttgtttcaaggataaatttgttgtcattttccaaacatgaatccccattctatgtcatgtaaagtctgcaatcagccattgggaggctcaggtttcccttggggatatgtggaaactaagcctcgccctcatccctcccgaaacacacacactttcctctctcaccgtgtcagctttttcagctcggctttattaaaggcctttaaaaagcctctaaaactgtgccttcaacacgccgtgcctttgttcttccacgcctttgttcttttgccagccatgagctcagggggctgcctggcgggcctgagcctggggaatgcagggcctcgggtccacagcggctgtgcagacggcggagcagaagagggagaggttcgtcttccaggctgcaccgcgctggcggcgagcgggttcacagggagccggcggcggtggtaccacagcctggtgatgtcagacaccagtggttctttcagaggggtctctccagccccaagcaggaagctgttttccttctgtgtgtgcagccaaggcccctggaggggctgagagtcggggctgagtcttcctggggccagggccccccaacaaggcctccgatgagccccagaggacctccctctcaggtactaataaggtgtccaagttgcaacccgctttttggccttgtccaccctatggttttcaaggctggttggaacttgctaatgctaaaaaatatgtattaccttggttgctgtctggcagcttaaaatacatgtgtggagaataacagcctggactgcacccttccttgcttgggaaaggttttaaaaggaggtaccgctcagaatacctctcacatcgggaactgttatcattttatcgctcacttgcccatctccaacagacagacgcccgtgcaatgcaacgtctgttgcattgctatttgctgtctgccagtgaagcttgacccccagtggctgagttttgcctcaagaaggtgatcgtggatgtcttatacttcccacacttccacaggtctccccctcggtcatcattttgcagttaagctgttcataaaatcgaatgggtcaggatacagttaagtaatataacagtaatggccccaatgcagaaaacagctaaaccacaacacacagaagaccagattttaaagaaagattgttcttgttaattttcagtttcaaaaaattgatatcttactttttgcttcttgtgtacatttttttttgtcacacatgtgattccatcttaaaagacagaatcatagaataggtaatattctactctgaagtcagagcgaggtctccagctctgtgaattctgtttgtccttcttcatctgcaagttggggataattcttatctaccttactaacaggtgttcatgagaactagggtaaaacaagtaacacatttaggatgagtaagtgctgagtgtattttaatgattaatattattggtataatcaaaattatattagtttttcaaaattataatgacatatgtctcaatgtgaatatatatatttactattttaacatatgtaaaaatattcatcaagtcaaagatatcttctcttaatcaaaaccaaaataattacttcatgtgctttgaggaagagttacgatgagaacctttaatgattggaagatgaagtgcctttgctctgaaatctgacacggaacaagtatggtacatgaattaggttttattacatttttatcctcttacctttgtaattgcttcaagttgtttcaccactggttagagtgatttgcgagggcaatttatgatgccaaaatgatgtcaatgaaagtctggagtaatgacagatgatgtcaaaacctgagaatgtaaatgcaaattgtagttagactaaaaaaagttaatgccaaaaagcatattaagctaacactacatttgaaagattttatgggaaaaattaaagaaacaagatgagttatgtgctatataattgtgtctcagtcctctctatgcctgactttttttagacaaattgatcataaaaattaaagtaaatcatggttctcagtctgtgtcttcactgtactgagtgaagtgggcaatttgccagtgcccagaagaaaccaggccctcctccattgtccctgcatgaagcccagaaggaaccctcagaccattgtgtaagacctgggggacctctgagtccccgtgttccagtgagagctggaaaaggtcttggggggcggtcaccaaatcccaatccttccctttacagggtgcaaaattgaggccctgtcgcttcatgtgacttgcttaaagcaatatagccagctagctgcagagctgaacaaggaggccggttccactgtgctgcgggaattctcagccctcctccctccccggtcttccccatctgggctcttctccctccatccccagctgaccccgcccttccctccagtggttattaaatcctaacatcctaggtaagggttggcttgggccctgaggagcagtcactaaagggggcagctcccaaggaatgcaaatgacctgaggacggactcgcctgggagtcactcctgtgtcatgatctgccttgtgctctgttgtttttctctaactcggtgatttggcattgctaaagcatcacaggcctcggagagcaagtggagaagacgccttttggactggaagcccttccttcacaacaaggccagctctggatgttgtgtgtggtttccttggcgctgtattttagcaatgactgtgcttttgatcacagcctgataaatgtcccaaaggcctgactcagagccacactctggaaatgacgcagggggcagtgagcccaaagacacaaagctgtcccggtgggcactcagggcttctgtctgaaacggccacctccaggcctgctccggcctcacgctccctgcacctgctcttgggtagtggccccatattgggaactgcaccctggtggagcgctggtctaccacaaccttcctctctagcctagtccagccttgcctgccagacgaaagcccggcaatgcctgcggtgttcactcctctgaatctgccagacactcagggtgctggtgacctgaacgtggaccctcatgaatccccacttgctggtctccagcaactctgctcacctgccttgtagcccaactatgttattgcctcctaatcccctgtcacctgaatatttttgtggttctttgtttgcagaggcctcagaaactaggtgattttagaaaataaatatggtctcattaaacctacatgttgacccgtgttgtaagccagtctcttaaattagggcattccagaggtggaaagagacagccttgccattcgtttgaacaaatgcatgtctttgtccggccaggtagagatggggactttttcatagatgaccccatctctccataaggttgaaatattttctctttctccccattaggttaatacataaagtctcccaattaaatgctaaaaggtaacatagctctcccagtgaggattcctgctatacacaggcccctacatggcaggcacgtcccttcaggcttccctataaagatgaggagggtgatggcaggcacgtcccttcaggcttccctataaagatgaggagggtgatgccaccttcttttcgattgctgctgaattaagcccatattctgcattgaacagaggcagaaacttgggagtaccatttaggaactcaaaataattgagaacattactcagtcgtaatgagcattactcattagtccaaagctcccagagtcagggtggagggagagggatgagtgataaagttgagagttttccttgtcgttcctttaagtctgaaaccagacattctagctttgaaatatctgtttctgagtacctataggaatgccccatgaggatcaatgtcaccattcaaaattgtttaataagctatccttatatggtgatgtgatgaacaccaaccagatcagggtaaactgatcaccaatgcagctctcctgagctcatcaagctgccaattgacagagatgtgcactgttggactaacaagagaataggatggccccctgatgtacgttttcctagcacccgacacttcagctgtcataaccctcacccaacatctttgtgattagtgatgatttgtgtgacatttttcctccccaataggctataacctctgtgaaaacagaccttgtctccctggatcacagctatatccaccaaggcctggcacaatgcctgacattcagtaggcactgatgaatgaatgagagatggattgatgatggttggatggatggatggttggttggatggatggatggatgaatgaatggatggatggagctcagtgtattcatattgtggtcttgcattcattttccaaagaaaacatattaggagtagcatgctgacacaatgtggaattggggagaaattgcccttcctccaatttagttgaagaaagtctcacaactaatttttagacatctctaaagagtgatgaccatattttgctgattaaatttcttttctgtgagccctttatttagtgaaatttcacttctgatattttcttctgtcttatttcattctagtctttattctaagtttgatttattatttgttgtttttgttgctgtaatgtcccaaaatctgtggcaatgggctgtttataaattttacctgaagaaactgcataattgtcacacctacccaagatatcattgagatatgatgcattctcatgggctgtcataacaaaataccaccgactgggtggcttaagcaacagaaatttattttctcacagttctggaagctggaagtccaagatcaaggtaccccaaaatttggtttctggtgagggctgtcttcctggcttgcagtcagccgccttctcgctgtgtcttcacatgttcttttctttgttcacatggagagagagagaaagagagcaagttctctggtcttcttataaggacaccagtcctggattggattaaggccctattcttatgatctcatttaaccttaattatctccttaaggatcttatttacaaatactgtcacatagagggctagggcttcaatgtaggaatttgaggagaaggcaactcagtccataacacatgacaaatggaattcctaagacactccaaattatttgcctttggctcctctagcattgcccatcaccctatgtgcatgtgcagggcttatccatataccctttcaggttgaacagatgctgtgtcctgcagccactggaaagtctgaggtaaaatttctattttgataacaactcttattaaaagatgaagagtgcctttctagtgggttcgtgtccagaccctgaatctatgtgccctgttttgaaatataacattatgtggaaacatttatcagatgggtatcaagcattctgcccagttttctatgacttggtttggagaatggactgacccaaaccttcagaagagagcccctggggctttcaagaggctggggaggacgtagaaccatcctatttggaaggaaagccattttcctctacctcccctctgactcccacctcctcccaggtcctccttacctggatgacaattgcccggcttccagaagcacagcaagaggctgctggcttcctcttctcttttttatgttcaggtagagctgaaaccatcaggcatgaggatgtgtgctgacttggagtggacggacccatcaaagtcatgtctgcccttggctcagccataactctggagctgagtgacggggacgtgggaggagacaccaccacctctggcatcttgagaatggacattccctggtgcaagtgaactgggctcacagcttctcgaatgcccatgattaaagaaaaaatgcaccgtactgcatagataggacccagtctgttctccattatgtataaatttctccattatcttatatgaatccaagaggcatggtgaaatgaaatttacatctctattattaattaccagtttctttgctctgtaaaggtgttcttctacatccatcaatttagaggatattatcatttctgtatcaatcatttaaaatgcaccaaaataaaaaagtaataagaattcacgttcatgatgatttttcttttcccacaggagcgaattctacccatgacgatatcatattcttgcttctgaaggaaagaaacctttaaaaataaatgcgtggttgtcccagttacagaaatgaattttttaaagcccaagcttgtgataattaccattcgtggatagaaacatggcagagggtttttcaataaaagttatacccctaaacaaataaccttgctgcaaaagaaacttcgtgcttctgctcagagacaggtgtcttgctaaaattacttctctgttttctgttccttcacagtggagatgccattgcctttgaaaaatctactaattataacagcattatccaacaagaagcaacagtgagtgttaatcaaacagatttactataacagacccagacctagcaataccagtgattgcttaattcgatccagctgtttttctgtgcgtactcttctgactctaggtagcccctaaccattcacccatctgaccatgaatgttcagtgccaccactttccacatgccgtgccaagacagacatagtctctgtccttaaggaacgtactgtttggctgcacattccctgcttaactgtgtttcttcagctaaaattaaaaaggatatataggctgttggcaataaatgtgtctgaagtgtctccctattacagttacagctctttgaattaggacaccagaactatgaataactaatgtatgacatcatgagttgattttattttagtgggccaaaacgatatgatagtacttggatactgtcttagtgcgagctgcaaattaccattgacaggatggcttcaacaacaaacatttatttctcacagttccagaggctggaagtcccaggtgccagcgtggccaggttaccggagggccctctttcaggttgcagacgactcctcatcgtgtctcacgtggtggaaagagagggagcaagcactaatctcattcatgagagctccactttcgtgacctaattactcccagaggccccacctccaaataccatcacatgggattagaggttttttgttgttgttgttttgagatggaatctcgttttgttgcccaggctggttcaagcgattctcctgcctcagcctcccaagtagttgggattacaggtgcctgcaaccacgccggctaatttttgtatttttcgtagagacagggtttcatcaagttggccaggctggtctcgaactcctgaccccaagagatctgccccccttggcctcccaaaatgctgggattacaggagtgagccaccacgctcagccgggattagggttttaacacatgaccctgcggggggcgggggggataacaacattctgtccgtaacagatactgtcttgttgacaagtgtcattgaacagataaccttttataaacgtgtttagtgaccagccttcttgagggctgaatgggttgtgaaagaaccgctaaaaacaaacaaagtccctctacttaagtaggacacagttttgtagtcgggaagctaagatagacgtggaacaatgggtaccatgtcgagcgggcagtgcaggccatgggtggtttgggaactccaaattgggggtccgggagaggggctgtgggaggcaagagtgattagagagggctgcactgaagagtgcggttcccactgttgttgtgacaaattagcacaaagtcagtgacttaaaacaacacaaatctgttatcacacgccctggaagtcataatttcaacaccattcttaccagactaagatcaacatgttcgcagagccgtgttcctcccggacattctagggaagaatccattccttcccttttccagcttctagaggtccctcccattccttggctcacggcctccaccccatcttcaaagccagcaaaggcaggccggatccttctcacgctgcagtctctctggctccctgcagctgggaaaggtggccttttctaaagcacctttgtgatgacatgaggccacttggataaggcaggaaaacctcccatctcaaggtctttaatcttaatcacatctgcaaggtccctttgccatgcaagggaacatattcataggttccagggattaggacgtggacatttttggggtggaggggcctgattctgcctgtcatattatccttgagctagtcctggaaggggtcactggcttctctcttaggagggtgttcattttgagggtgtagcctgcattggagccgggaggtgatgacaaacgtgtgtggaacccagcgtgcatatgctggggagcagcacactgggcgaggtgggtggagaggaccagagggcacagagcttgtcgatgctaggcagagaacttggatttgacccaggagaccgtggggcaccatcaaggcatcttcagaaggagagtgacaggatacatttgctttggggggtgataattctgggaacagtgtcttcaaggattcaggaaggatcaaagtcattcaggagaattgatggagtaacccaggggaggcagatggtgcctgatggagcaggtgatggtggaaaggtggcacacatcagactcccaggggctgacacctagtgcatgctcactaaagaatgagtagatgaatggtagcatgtaactccagtgacatttcttgggtctgtcaaaatctcaaactgcatttaatatacctaaagaatccacgtagaatttctcaatggtcattttttagatatagcttttgtttatacatatttgtcattatgcagtatttatttatttattttattttttagagacgaggtcttgctcttttgcccaggctggagagcagtggcacgatcacagctcactggagtctccaacttctaggctcaagccaacttctcacctcagcctcctgagtatttaggactacaggcgtatgtcaccatgcccagaaatgttttttgtgtttttgtttttttttaattttttgtagagacaggctcttactatgttgcccatgctggtcatgaactcctggcccgaggcaatcgtcctgcctcagcctccaaaagttctgggattacaagcatgagccaccacactcaacacagttattatttaaaagttggtggatttttaaagactgatatataatagatgtatatattttctggatatgcgtgatattttgacacatttctatactgtgtaaagatcaaatcagtataattgggatacttattgccttaaacaggtatcttttctttttctggaggcagccaaatgattcttatctgggtatttgaaaatatcaactagatttttgtgaactatagtcactctactagattgatcaaagcctaggtctcatttcttctgtctgtttgtacccattgatcaacttctctccatcctcttctttgctttgctgaattattgtttccacactggaattcctcagcatgcttcctgaatgccttctgctgtagcgaatctcctgcagggtccacacgttagtggctctgtacgctacttttactttaggtttctgattgtttatgttgtaaaggaaatatttccatttatgattttaaaaatattgtttgtgaaagaacaattcttttcacagtttttaatgaaaggtttatgcctataagtaatgtctatggaggaagagacctcagggattgacttcaggaaatcatgaatttgctctttattatgttgtgtaataaaacacttttatattctccttgtaattgtttcttgaatatcttaacagtacattgtcagatgttttcttctgaacaggcgaaactgtgttgtatgtgccatggtgaaatgtagacatttctgtagcattcgataaagaactgtctgcctaaagctgcagttctcaacatgggcatgcagaaggctcagtagggaagctggttatacatctagagttcttgtctcatcagattcactagaggcctaggaacatggatctcaagggccccaagggattctgatgtgtttgagaatgctgctttgggaatatcagcagtaacacccagagaacattgacataaccagggtgtgagtgctctggaaaatatggatgtagttggggtctttcattatgagacattagcccagagctgaaattgaggattcctcagttctctaacagagcgcctatgatcaggccaatgagcttcatggaatagctccatcctttagtatgatcaacgtgagcatcacccatacccacatacaagaaaacccatcttcttttttttttctgtttcaaattattattttttaaattatactttaagttatagggtacatgtgcacaacgtgcaggtttgttacataggtatacatgtgccatgttggtttgctgcacccatcaactcgtcatttacattaggtatttctcctaatgctatccctcccccaggccccgaccccctgacgggccctggtgtgtgatgttccccgccctgtgtccaagtgttctcattgttcaattctcacctatgagtgagaacatgcagtgtttggttttctgtccttgcgatagtttgctcagaatgatggttcccagcttcatccatgtcactataaaggacattaactcatcctttttatggctgcatagtattccgtggtgtatatgtgccacattttctttacccagtctgtcattgatggacatttaggttggttccaagtctttgctattgtgaatagtgccgcaataaacatacgtgtgcatgtgtctttatagcagcatgatttatagtcctttgggtatatacccagtaatgggatcactgggtcaaatggtatttctagttctagatccttgaggaatcgccacattgtcttccacaatggttgaactagtttacactccaccaacagtgtaaaagcattcctatttctccacatcctctccagcacctgttgtttcctgactttttaatgatcaccattctaactggtgtgagatgatatctcattgtggttgtcatttgcatttctttgatgaccagtgatgatgagcattttttcatgtgtctgttggctgcataaatgtcaagaagacccatcttctgatgactctgaataaagccaatattgtaaagtgtggtgtgaatgaggtttagacagcacccaatagagagacccctttgagctgtcccctctgtgttcctgctttatgtatttatttagacatctatacccctacatcattccaacagtattaacgggggaagttttaacgtggcatcttcataatattgtgtgcgtagtatgcattttctccagggagagagtcagttgctttcatcagattctcaaagaggttcagaatcacaacagagttatgaagtatagattttagggcactgagaggacagttaaacatgctctctaaacttctgtgatcctcaatgcagtactggttgatactggggcatcggagaggaggaaaacacagtggtgcctgtttccggtgtgtgcagcactgtgtgggatggtgtctgagctcactcctctgctaaagggtgggcacaggtggttagagaagctgccctgccctcagatgtcttatagacaggaacataccaaaacccacataagcaattctataagtgagtagcttagtgaggcttagggtgcttaaagactgggcaggctaaggatggaatgctgaccttggaactatagggtcagagagcgggtcatgaggtttgagagaaaatgaaaagtcacagtctggcgtagcagggttggctgctcaattttcaacttggaggaattctttcatcctactttattgtaagggaaattattcaaaagcagtctatgacaatgctgaagaaatcatttcaaataaaattgataccctttattcagaccaggaggagccctcatgcctccccatgcccagaggggacagcagcatgagtgacacagggaggcagggaggaatgtcgcacttgctttctgccatgccacctttcttcctccttcccatcctgtaattgcttctttttttttttttttttgagatggagttttgctctttgtcgccaaggctagagtgcagtggcgtgatcttggctcactgcaacctccatttcccgggctcaagcaattctcccactttagcctcccaaatagctgggattacaggtgtctgccaccacacccggctaatttttgtatttttagtagagacagggtttcaccatgttggctaggctggtcttgaactactgacttcaagtgatccacccgcctcgccctcccaaagtgctgggattataggcatgagccaccatgcccgggcctgtaattggttcttctaaaggaaagtccatgctcctcattttccttgttggcaatggccctgagatttctgatacaaccaacggttgttatgatataggcagaatgacccaaacagggatgattttatttcaaggaggaacaattacatggacaagggttgtagaagtgtatttgtgatattaaataattcatagataatagtcttattgtacattcctatagaggatttgtaaatagatgatcccaagagagatacatttggtaatatattaaatcctatcccttccctgatggccatcgttcatagaattacagacaaaaattagcagcatttggaatacaatatgagaggaaagctgctggaatcagtaatgtgtgcagaggtgtggctaaaaggttatacacaatattaacttatagtagtgtgatcataagaagatttatatgccaaaaaaagtattgtattttaaagacataatccattgcacaaatgatttttagtgtgaagatcattcaccgatgaagacagacccagttggatcccctttgtctgaattcaggagatgtccatttctggagcaagaacaggcaaagaaatactcctgtaatatggtaggtttgcactcatggggagattagcctttcacgctgtatgatgcttagggcagtaaatagcttccttttgtgcctgtggtcatgattgtgtcacatggaataatgtttgcctttgctggacccgtgaggaccagcaaccttccctggcttgatggtgctcagcaagttcagggttccctatcacatcctatggcaaggctcccgctgggactgcctcttccccaagacaaagaaagaaacagatatatggattttctagaaattagggctggggattatggagggggaaaattgaagtttagaaaaaaaggtgtcaaagtttggtggcctttgtagtggtagaataaatctgcaaatatgagttatgacattgaaatgaaagctacatgaactatcagcctacaaggtctgcattagttcatagaaacaaaaaaaatgctgtggcccaagtgaagagcgcagctattgtcatttgagaattgcaacaagagcggcctctgagagcttcagaaaagtctgtgaagatcagttcattattgaaaaggcccacatgctgaaataattttccatattcttcctagatggccttccttgctgacgaatactgcaactattgtcgagacattttacgaaatgtgaggaactgagaacttgagagggtagggttttatctataaaatacaagcatttatgactccttattaatcatttttatttgaagagaccccgtcaacagatgtccaatggtaacccactgcactgaagtgcttacatgctatgtacctatgttgtagtcattgagttctggaaggtgagatcgatattcagtgtaatcagttggaaattctccaaggtgctaatacagataactttaggctctaaatacaaattcagctattttttagatcctaattctgctcattttgaataaagtgttggtaataaaattcaccctggaattttcaatggtgccgaagagccatttgattgatacgcgctaactgaagatggagcaggacttcgcagctgagtgatctggcatgggtattgtcacgattggatttaatcctagaattggctgtggaaaacatgaataaatctttcagctattctgagtttcatcttctgcagtgtgagatgaaaatccaaggaaacaagtgcacattcaaatgagatttttttcctgatgctttagtatattctaagcacttcaactttgggtgataacgctcattcagcacgagcgcatttactacctactcggcgtaaagcattgtagtgagggagagaccaagatgtcttcaggatggcccctgtcctattgatgcaatgttacaaatatccatccacactggatgtctgacattattcctttccttcttcacttattcatcaaatacatatttaattcctaccctgtgaccgacaccgttaccaggactaggaaagtattctccataaggcttgagaagttagtagttggtaatgaaaggagcaatattacccaataaatatgatgcaatgtggaaagttctagaatagctgcatgattagactattctgggtgcccagagaagggtaacagagaaggccagggagtgcttccaaagcaggccacgttgctgctgactctagtaggaaaggcagaggtgcaatagacagaaaatggggtaggagagggattccaggtaggacccatggtgcaggtaaaggcagcatgatgttcacgggcatgatgtgacaaaaaggtcactatgactatattttattatttctttttttcttttcttttgttttcttttttgtgtgtgtgtgtgagacgcagtcttgctctgtcaccgaggctggagttcagtggtgcgatctcggctcactgtacctccacctcctgagttcaagcgattctcctgcctcagcctaccgagtagctgggatcacaggcgcccaccaccatgcccggctaattttttgtatttttagtagagacggggtttttaccatgctggccaggctgttctcaaactcctgacctcaggtgatctgcccacctcggcctcccaaagtgctgggattacagccgtgaaccaccgcgcccagcctagattttattattactaaagaagagaagccagaggggaggtgggaaagtaggctgatgccagaaggggcctcggatgccccagaagaactctgacttgttgagaagacagtgggggagcagtgacaatagggcttggccgtcgtggaacagagaggcagcgaggaggttttgtcacagttgaggtgagaagcgacaagggtgggttctggggcagtgacagtgatatcagagataaacagggcaggttagagaaatatttcagaggcaagcgcaacagggtttggtgacttggacgcgggtggtgaggggtgagcagagacgggtctgtggtggtggctccacccagaccccccttccccaaagctccttgctccgaggttcccagcctgagagaaaagggattgctacaccctgtgttgtatttttcagagtctctttggagaagtcctctctagaatgaatgccctgataacgggattttaaatcagcgcctgtggccatgtaattcgggagttgaccctaacttccatgatgacctaggcatggggccagcgccttgtctggtgtcactggcaggtcctagcaccaggaccaggggagatacgacaaggttgtgatgcctcacagtatctgagcctgtggaaatcccaaacaggcaagagtctttattggcggcgaagcagatcggtcacctggttaaagaacggaaactgaaaagtcaacgtgggaaaaaacagaaaagaggagccgccattttgatcctccacgaagtagtccacataagtctttagagaaggctcctgtgtagaaccacgccagtctccttttccttccacagtcgttaggtgacttctaacttgatggcaaggagggggtctcttagattaagtactatcacacctttctctgagctgaaaaatgattgaggcagtcagtcagtcagtcaatgaacatttattctctctgggctgtgccctgtggcccagtcctcatcctagtataatcaactggagcccccttgtggtcagaaacagcttcccttctagaaactgcctcaagaaaatattaataatgttctacattatcccatccaactggcaggtgctctcagatgggttgttggaaagaattctatcaaaatacagcttggaaaagctgagaggcaaagctttacacgcactggaacaaaattcatcccattgtcatctggggctaaggaagtatctgtggcggggggttagtcttgcgaggtggaaaacgagttttggcgatatgctctgttacttaccccaggtggaggacttgcttacttccttctggaagtctctgcagcaagacacagtcatgctgatgtcattgcctgacgtgtgccagctctttaaatgctacgacgtccagctgtacaaggtaggaggacgcgtgagtctctagagtatatcctttgcagaaattggcagcaaatgctgggtttggacccacagctccacctctctgcagtctccatggtcctctgaggagtgaatagtggggtgtatggaccaggagccctctgatctctgcctaacactcagttttcctttgtgaattacctcatggaaaccaaaagccaatgcacatagtaacctctggttccatatcagtgaagtccgaattgagtcgaagttctttctctgggaatttctgtaaaagaagacattctaaaatgaataattggaattgtaatatgcataactgccagggcttttgttttgttttgttttgctttgctttggttgaagctctatctctaaagtgattgtatttggagggttgtatttggagggtcaggtttatatcttctctggattaaaaaggtgttctccttcagcgtgtcacaagccttaccttttattttattatttttaaggaaaccatctagtacttccaagtttttaacacaaagtttgaaaactagaagctgggttcagcccttaaatatatttggtttgacccacctaatattggccagcattgtgtgattttttaaaaaaatacttgaatcagttatcaatcttttaaaaatatttgaggccgggagcagtggctcatgcttgtaatcccagcactttgggaggctgaggcgggtggatcacgaggtcaggagttcgagaccagcctggccaagatggttaaaccccgtctctactaaaaatacaaaaaaatgagccaggtgtggtggcatgcacctgtaatcccagctacttgggaggctgaggtagggaatcgcttgaacccgggaggcggaggttgcagtgagccgagatcatgccactgcactccagcctgggtgacagaacaagactccgtctcaaataaataaacaaaaatattggaaaaaaattccaactgtggctgcaccagcctgacatcctgcatgggaagcagtggccacgttgcatggtgctgccccttcaacctgggtggggacccgctctcagacttcttgagacccgccctgtccctgtggcatgcataagcttcagccacacctgcaccatcagcagaatcatagtgtcttgttacttttgttgtagggaattgaggatgttctccttcatgacttcttggaagatgtttctattcagtacctgaaatctgtgcagttatttagtaagaaatttaagctgtggctccttaatgctttggaaggtgttccagccctcttgcagatctccaaactcaaaggtaggtttcgatgaaaaaaataaattctgggctggcacagtggctcatgcctgtaatcccagcactttggaaggccgaggcaggaggatcgcttgaggccaggagtttgagaccagcccgggcaacatagtgagatcctgtctcacaaaaaagttttaaaaattagctgagtgtggtggcacacacctgtggtcttagctactcagaaggctgaggcgggaagatcacttgagcccaggaggtcaaggctacagtgagccatgatcatgtcactgcactccagcctgggtgatggagcaagaccctgtttttaaagtaaagaaatacataaataaataaattctgtaagcgtagatgaagcatctgactttcaccctgggtggtagctttcagctgctgccccatgcactcagctacagtccggaaggcccagcctgctcagggtttctggcttttagtgctggtgatggatttttgtgctgatccagccacacccttttaagctatttctcttttgaataataacatggacttttggcaggtcaaggtgttctaggtgtggatattcaccagggcattctcacacctgaattgcaccatctctctgctgagtttctagaatgctttccccttctgtctggctgccaggcagcagtctctgaatgctgcttccaccaggctatttatctgttcaaggcctgcagtggcttccaagcgcgagcctgaactgctctgtcagctggtccagttccctataaatctatcctctttgtgtccctgcagctccatgctccttcaaaggccagcctgcacctgccatgccctgtcggatcatcctggaaatacccattttctccctcttgcctttgtgaagttttgctatcattgcctgcagctctcgaactccctacggggtcccaccctccttgccaggtcagggtcattttgtcaccaagctggcaccagttatttccccacatttctatgagtcttgcttcctttgcaattatctcctaggtagtgcagataggggacttctcaaagtgcctacagcataggaccatgtctaatcgccactcctcccgaccccacgcccccagctgtgttcactactaacactgggtaccctgatccagtttgtcccacttggaaattttagggacgttgcagaaggtgagactgggacttgctgcaaaagcggtccaaggagtggggagcagagcctccctccagttttcctgtgctcctttaacatctgcccgaattcaagcctctgtctcttcattctgtaggctacttcagcggtttcctagttggtcatccttcttccacccccctccccagccacactccctccacccccagtgatcattctaaagcagcaattaatcaattaccaaccttccctggcctccactgcccagatggcccactctcctccactgctgtgcagtcattcacagtttggcctctggccccatccctgtctccatctcccaagggactcccatgacccaacagtgctcttcagcaacactagacaggctgtccccagaaaaggcccttattcctgccattttctatgcttggactgcctcctgccccattactcctggctatctcctacctatgcgtcaaagcccagattaaatgtcaccttcgcagtgaagctttcctcaataccttcttccagacagcctccctttcttccttgtgctcgcacatcgcatgggagcacttagcctgcttttgggatgtgtttgcatatctggtgacccaccctctggagcatgagccctttgtagggaagggctgtcctcttccgtccatcagctcagcagccatccagcaaatagttattgagcaaacactgcacgagtgttctcccatatatttgtcaaatgaatgaatgcgttcaagaggagaacacctgtttctatgcgttcccttttcatcctttcctttcctttgattattttccaaggaaagcagtgtaggatgagaaagttggggttgttcctttgagtactggtcttagtccaatctggctgctgtagtaaaatgccaccaactaggtggcagtatataaacaactgaaatttattgcttatagttctggaggctgggaagtccaagatcaaggcaccagcagatgggtgtctggggaaggtctgcttactagttcacagatggctgtctttttgctttgtcttcacatggtgaaagaggcaaggggtctctctggggcctctaatcctcttcatgggaactgtacactcggggcctcatcacctccccaaggccccacttcctaacaccatcacaatgggggtgaggttcaacatatgaaatttggggtgtgggacacattcagatcatagtagcacgcatgtcagatgctggggttacttaatttttctggcacatgaggacatttcagccaagcgtcccctgccaggatcttctagccactcagagagggccagcagacacgggggtgggggaagttgcagtttagccagctgtgccttcctaccccaaacatgcaccttctcttccccactgcccacatgagaacttgaagttattgtattaatggccacgtgtgttgttcttaacagaagttactctatttgtcaaaagactaagaagaaagacgtacctttccaacatggctaaggtaggcttcagccaagcagataggagggaacaaagcagtttcctgaaaagaggtgaaagctctaagtccctgttaagagtgagtggttgctctgtccatctggagggcagagggcaggcagggtggccttgcctggccattggcagaggagtccaggtgggcccccgtgactcaaagctagaagcctgccccctttccacccatcctcaggaaggctccaatctcctggctctctcagggcaggagggaaggcaggtcaacacttaaaagatgcccgatggccaggcgtggggggctcgtacctgtaatcgcggcactttggaagtccgaggcaggcagattacttgatgtcaggagttcgagaccagcctggccaacatggcaaaaccctgtctctatcaaaaaaaaaaaaatacaaaaactagctgggcatggtggtgtgtgcctggagtcccagctactcaggagacaggcaggagaatctcttgaacctgggaagtggaagttgcagtgagctaagattgtgccactgtactccagcctgaacaacaaaacgagactccatctcaaaaaaataaaaaaataaaattaaaagatgccagagggaggccccacacagaggtgccagtgtcagaggtaacagggcgtcatagcagagcctatgacagacagacagacacacccttcacccgtgtgtggggccctgtggactcagtgtggccaggccaccagttacttcagctctgaccttttcaatcctggggtgatttagagaaaggttgagaagggctgaagaaaagattctatgatgctggcacccggctcgtgggctaccaggagtcctctctcaagtcctgtgagcaccctattgggatagagcctggggaccatcactgtgctccaaatcagtctccactgggaggatcccaactgtggcttccatgaccccgagctgggccccatcctcccagtgcagagccctccccagaatctgagctcagcggggttgtgtcccactgtcagtcacagccagtcctgttctccagggctctcacagtcctgactcggtcagtctggaaatgacctggcagtgtgctcttcctctcaacacaaccagagcagtaagcatgggttctgaagcctgcccctgctctgagccttatcttcccacttactgcccctcaggaaagttacttcacgccccaagagccctctgtgtcctctgtaaaagggaggggtaactcgtgccttctcccaggactgctgtgaggacaaccaggtgcatcccaggcagtcggacagtgttggggactagatagtccccatttgacagctgaggatatcacctcccagaggccaaattcctcatggccaaggctcccacgaggaagggacagccagcttccgaatcccgcagccgctccctcaggatcggtgcaggctctacctacaccttccttgcagaggctcaatccccgggatccctcgctagagtcatttgggcgtggggcgattgtggtgcagagaagcagcagcagcagtgccagacagccctgaacgcatcttcctagagatgcgttctttctccttccagaagggcagttccagaatgtgtgcaattttaaccttttcattcttgtttaagattcatttttaatgggtaatatccacatcaatgtttctttctcccccacaacaaaaatcttggcaatttgggggagagttaggcaaaaataaaatgaccagattgaattaagtattatgcctccctgttatctttagactatgcgaatggtattgaaaagtaagaggcgtgtcagcgttttgaagtcagatctacaggccatcatcaatcaaggcactttggctacttctaagaaagccctggcaagtgaccggagtggcgcagatgaactggagaacaacccagagatgaaatgtaatcttccttctgcagcttgctttattggcgtgttgggcatagatttggggctagcatggccatcgttaactcatgaatttcttaataggggtagaactttataactccgatgttctaagttgtctgctcacacttctcttcctgtagtggggtgatgaacaccccaggggacgccctgtccctgtgctcccaggacctaccccagggccagacagggcagcagtgctgatacctgttagttgagtccataaacgatcagatgagtgtgcttgctgcttgacagtatttatctccagaatatctcctgtgggggaaaagcttagtttctgcatctgtgttgtacacacacagactcctgtgtctcctcaatcatgctaaactgccttgagctagatgtctgcgtcgacacattctcccatcactcttgttacttgcaatgtgaagtttaacaatggtgcttttaccatatttcattactttccaaacaagtgacaggaagcaggtggatattcttgccatttgctattgatcattgtcattgtttttcaagaaaaaaatcccccttccataaagagcttgcgttgctggctggtgtgtgttgttgcgtccttggggagcgaacatagtggcagcaggagctctccagactcagggaggacctgggaggcaggaagctgcaggatggttaccgattatgaattatgggcatctctaggccctcctatgatggctacagggagggtgccaggctcccctgtgtgtgtcctttccaaacactcgctgccaagatgccccaggtaagtcgaatggcctctccctctatgggcataactccttggtagtactctcagctgtgtctacagctgcccgctcagttcctatgaaccccttcaggctatcaactgtgtcttattcaccctgggccacccagcattgcactggcccacaggagcacttcagtgtttcgtgacttgacggatacagaattcaggagtacacaaaagcaccacctgtaaattagcccatcctctttctttcaccctgaagtagggctggccttggtagggttgtgccagttattaaaatactaaaatatatccctagttgttggtaaatgacctctgctcccctctactgtcctgtcccttgatagtgtcccttggctgaccccaattccagatcctcccatagggcacttttttttcccaccaatccagcaactaaaaggttaacacctaatctggcaggcttcagaactattagtaggattactaattctgattagtaattctgcagttctgactagtaggaacccaaaaggtccccttcccaacactctggctaaccaaaacctcctcttgcccccagctggatcacagggagtcccaggagggcatgagacaccccctcccccgcccggtgccttccagactgcccactggtctggccagggctcctgtgctcctactggcatctttgtgagtcccaacaggaagatgcagagttctgcagggagatagcagactgccagccactgctgatacctgcaggcaaatgattccagttccaagtccaagcgcacctccaccaagcctcagaggggccactgcaaccgactcagttttccaaactctgcttggtatgcagaagcactcaaaaagctgggaaggccaaaggctgttctttccctgtcagtgctacctgtgcaggtggaggacccagaatctgatgtcacaccaggctccacctaactgagtgcataaccgcaggcaaggcgctcaccctctctcagcagctttgacgtatgtctgccatcacttcaatgacattaataaaccagccctttgatgaagatggcaaggataggtgaggtcatgtctgtatcgtgcaatgagctcatctgaagacaaggtctggataattgcaaggtgtagttatggtttcaaaatatttctgtttcaacaagtggcagaggtggctcacaacaggtatgtccatgtaattctgaatagatgaccgcagaagtgacaaagccagcctcaggacatcctctgtgttcacaatgagcatgaggccctggggagtcccttcgagctattgttcagtgatgtttccaggttacccagtacacaaatacctaagagaaattctgctctgctgcatgcaatcttttgtttgtttattttgtgtctttgtaggtttaagaaacttaatttctttgctgggaacatcaacagatctcagggtattcctcagctgtctgtcttcacatctccaagcatttgtgttccaggtaggaagctgtgacttaaaaaaaaaaaaagtgtgttgaccattctagataaatgagtgcccattgcctaagggatgggaaagaggcttcttaggctctggtcggaaatgtgtcaaagctggcctgggtgtgagggcaggggatggcctcgaactctgtagcaggtggagaatgggggtctggtggagcacatcacataagtgtgtgtgtgtgtgtgtgtgtgtgtgagtgtgggcatatgtttgggtgtgtgggagtgtgtgtggaggggcgagcctgtgatgagcatgtgtgtcagggtgtgtgtgagcatgtgtgtatgtgagtgtggtgagcgtggtgtacaggtgagtgggtgtgcatgagcgtgtgcagtatgtatgtgtgggtgagcatgcatggatgagtgtgtgtacaggtgagcatgtgtgtgacagtgtgtgtgagcatgtgtgtaagtgggtgtgggtgactgcgtctgcaggtgtgtattgcagcaaagggagtgtggaaaaggaggaggggttttgtctatttcagggggagagcagcccatgttttgcagacatgttccagtaaaatgtctggcttgatttcaaaagcccaaagatggtttcgttgtcgatatgggcaggtttgatcctttcgaccaatgtggctcttgggagttgcttcagtgggatcctgggcttgattttcatcatcctccatgggggcagtggagagctgagaatgccttgagagaggccacggcccttcactccatgggctcagggcaggtggggagagctaggggctgcaggttaaaacctacagggaggccaggcacggtggctcatgcctataattccagcactttgggaggcccaggcaggaggatcacatgaggtcaggagttcaagaccagcctgtccaacatagtgaaaccctgtctctcctaaaaatacaaaaattagctgggcatggtggcacgcacctgtaatcccagctactcgggaggttgaggcaggagaatcgcttgaacccagcaggcggaggttgcagtgagctgagagccactgcactccagcctgggcaacaaaagactccgtctggccgggcatggtggctcactcctgtaatcccagcactttgggtggccgaggcaggcagatcacaaggtcaggagatggagaccattctggctaacacggtgaaaccccgtctctactaaaaaaaatacaaaaaaattagctgggcgtgatgtcatgcgcctgtagtcccagctactcgggaggctgaggcacgagaatcacttgaacctgggaactggaggttgcagtgagctgagatcacaccactgcactccagcctgggcggcagagcaacactctgtctcaaaaaacaaacaaacaaacaaacaaaaacacctagagggaaatgaggcagcccgggccccacctcttgagactttgtgcttgccaaggctgaagtggttgtgaagggctttgaagagaaggtgggacttaaaactgggatatgaagcatgtgcaggattaaaataagctgagagagggggatcgggcattcaagagcaggagtgagtttacccaggaaggaaggagcagtccacactggtggagagagcaaagactccgagggcctggggctggaagcgtggctctgggctttctctttaagcttctggccgtgttgtggccactcccttgtgccacctgcctggccttgtctgtatccctgaactctcagttgagaagaaagaggagaaataatcactgagaccaagaagactgcaggggactttgggatcttcaacctcctagacatgaaccagaaaaatcctcaggaaggagctggaaagccagttccaacccttggcaggtgcctggtctcatttgcttcttgaaaataattatcccagattctgtatggtttttattcctcctgttgatcttaggcaaagcttatttttaacagcagtgaccatgtccagagctggatggctactgagacatttattcatttgctagctgaaggcttatattatacatcctcacagacaggcgctgtccattgtctgttcgttaagtggaaactggaactcagcctccagcgttttttttgttttttttttttgagacggagtctcgctgtcgcccaggctggagtgcagtggcgcgatctcggctcactgcaggctccgcccccagggttcacgccattctcctgcctcagcctcccgagtagctgagactacaggtgcccgccacctcgcccagctaattttttgtatttttagtagagacggggtttcaccgtgttagccaggatggtctccatctcctgacctcgtgatccgcccgcctcagcctcccaaagtgctgggattacaggcgtgagccaccgcgcccggccagcctccagctttaatcagatgaacccactgagatcatcactaccaaccctgtcgtcctacattgtaaaccacagagcgctatgtgtttcccaagtctccatcgttgtgccttcagccctcacaaaggaggcaaattagaaaaatggtgtttttgtaactgcgtgcctttgaaggacttgtttttgtaaaatagcttggctgatctttacaaaaccagattattgtcaatcaagtgctcagactattaagatgcacacctttgggcttgtcagagatgccccatggcttcagttagcatctggcagtcagcgagcagagggcagttcgggccctggaggagcttctacgttgggggacatgaagtgccacactgtggacgtgacgggaagaaagctcaatggtgttcatggctgactttcaaacatttgtgcagagaaagccctggtcactcagagctgcatccctcgatgcttttaggaagtatccctgtgttttgtttttttttttaattgagatggagtcttgctctgtcacccaggctggagtgcagcggcgcaatctcagctcactgcaacctccgcctcccaggttcaagcgattctcctgcctcagcctccggagtagctgggattacaggcgtgtgccaccctgcccagctaatttttgtatttttagtaaagacggggttttgccatgttggccaggctggtctcgaactcctgacctcaaatgatccacctgcgtctgcctctcaaagtgctgggattataggcgtgagccaccgtgcccagcaggatccctgtgcttttgtactctcattgtcccttcaacataaaaccctctgctgaacactgatgggaagagctcctcccaagagtccatctcagatggtgaggagcactgaggaggaggatgctactgaaaggacctcacgtcccctgaagctcagggccaccttctggtgtgccaaggatttcactggggcagaagggaaaagaagcaatgacaagaaagggcattctttgtttgtagccaagttctctatttcttcctcaaagacatgtggtggagctgtggtgggtccacaggcatgtgactgaggatgagaagaggcttggagcatgcatatcaacagatgcatttgaaatccatgactcatggcttacagatggcttcaagtgtggcccaaggctgctctctgtctgggtagagggaatctcttagtctgcatgcagcagcatcttattggtacacagtttagtgccaatgaggctgtcagatgaccttggttccactgggtttaggggctgggactttgcagtttggagcttggttacacagcaagcatgacgaccagcttttccaaataggcaccactgcttttcattattatgggattctgtgccccttttccacaatcagatttgacatgcagaagtgcaggaataaaacagcccctgcccctcttgatggccattccaaagtggacttcaatgaggctgtccctacggtgtttctgtgtcacacatcacaagtgacctcttttttaaaaactgtgtggtgctgggcatggtggcttatgcctctaatcccagtgcctttgggaggccgagacaggaggatcacttgagcctagaagttaaggccagcttgagcaacatagtgagacccttatctctacccaccctcccccccaaaattaaattagtcatgtgcagtggtgcatgcctgtagtcccagctactcaggaggctgagatgggaagatcgcttaagcccaggagttcaaggctgcagtgggccaagatcgtgccactgcactccagcctggggaacaggaagaccatgtctcaaaaaaaaaaaatttgctttttttttattttaagagaaaaagtgagccaatttcctacctccctccttctctccaccaactttaaagggctctgccctggaaccgtctccatggaagacagagaaagaccagacatttgccccgctgcctcagttcccgcttttgttatttcatcttcctcttctttggctctttaaaaatgcgtgtgcatgacaaatgtgtgcatttgaaaacatactatgcttcttgattttattacaaactgcagccttttttctcacaaaaacttaacagacaagcagaagcaaagaagagtttaccaaattggccgccagcttccagctgagatggaatcttcttctcactgctgtaagcaaagccatgaccctctgccacagagatagttttggtaagtcagagaataagaaagtattttgtattctaccttttaaaaatgtcattatggcataagtattttgcgtattgctatgtagaatccagccgtcttcttttaacctttctatgtaaaatataacatagatacagcaaaccatacaacacgatagtaatttttatttttagtgtcagtgtgatagtctgtcaaacagatggaccatgcttttccttcctgtttcatcatcgttagacacactctccttgttcttgaattatgagctttgtgacatttagagaaaagcaccgagagagacaactgagatggagaacaaaatgggttctttgaagcactcatacttaactctcaggaataatgattaagttgccattgtatgcgatggtagagagagtgaagtaatgttcattttgcaaacttcctggtcaaatcacttcctctgttggggaaggtcacatctttgatgcaattgccttataaaaagggttgtaggggttgggtgctgtggctcacacctgtaatcccagcactttgggaggttggggcagatggatcacctgaggtcaggagttcgagaccagcctgaccaacatggtgaaaccctgtctctactaaaaatacaaaaattagccgggcgcggtggcggacgcttgtaatcccagcaactcaggagcttgaggcaggagaatcacttgaacctgggaggcagaagttgtggcgagctgagattgcaccaacgcactccagcctgggtgacaagaacgaaacttcacctcaagaaaaaaaaaaaaaggattataggaagggaagttcaccactcagcccaccagcttcatggaatggatcattccttcaaaaggtatttcttgtttcccaggcaccttcctgggcactgggcatacagcagtggaaagataaagtctccactcctgtgagtttgcacagtagttatggcaagtgatccctgcatagagagctgccagatactctcacagcaagaaggaagagaaagcaagccctattctagaccagctttgcagacaccctggagctcctgagggctgctgctatcagctgccatataggtgacactcacttatagtgggactcttcccttcactgaagtccaaactgactctgctttatgctcctgctctttcagagcagagagacagcagagttcacatgcatcatgggaagaaatctagccctgagccgggtgtggtggctcacacctgtaatcccagcagtttgggagactgagggacacagatctcttgagcctgggagtttaaggccagcctgggcaatatggtgaaaccctgtcactacgaaaaaaaaaaaaaattagccaggtgtggtggcccagtagttccagctacttgggaggctgaggtgggaggattgcttgagccagggaggcagaggttgcagtgagctgagattgtgccactgcactccagcctgggcaacagagccagactctgtctcaaaaaaagaaaagaaatctagtctgtagttgttacttttcccagtctaccttctctgtacctccatatgaaatcaatgtattcacaccagtagtttgaacaatggtttcaggacttggactatgatttttcaaggttaaataggaaagacgatgttgtcaggctcacttcaggcaaggtcatgccttccacgggggcaatgatctctcacccagatccgtggaggaatagaacactactcagggaaaaaactgtgaagggcttttgaaatggatgaaaagattacttgaaatggacaaaaggctttgaaatggacaaaaggttggcacagccttctgggttatctctaccttccattgtctttgagttatttttacagccctgtaagttgcagcaaactgataatgcagatgaccctcatccacagaaatacaagctagttgtgtcaggtggttgtgattgatactaccctgaggacagatcccttttgcatctatttgtcactgtcagcattattttctgtctatagtatatagttagtactttgaattctcttttgaaccagtggcaacatcttactgatgtagcaataagatgtaatacatcatttaattaatgagttaaataaaacctttgatatgtccttttttcttttttcttcttgagatggagtctcgctctgtcacccaggctggaatgcaatggtgcgatcttggctcattgcaacctccgcctcctgggttcaagcgattctcccgcctcagtctcccgagtagctgggactacaggcacgtgccaccctgcccggctaattttttgtattttttagtgaagacaaggtttcgccttgttagctgggatggtctcgatctcctgacttcgtgatctgcccgcctcggcctccaaaagtgctgggattacaggcgtgagccgctgtgcccagcctgatgtgtccattttatatctgtataagagtcatggttttacctttatttaaaacttatcttttaacaattgcaataggccagatttccccctctgtttctcaagcaaacattaatgattgttttcctttctgggagcacaaaggccttgggatttggagcattcagctaagtcacataccctcctgtctctgatgacagcacttgcaggcccacctgagaagacgcctctcacaggtggaatgccagctggcctccttacccacttcccacacaaagagctgcagccacagggtctgcaagaggggcaaggcgctacgtttcaaacaccacaaaacagcagcagggttccctctgcacactgcccccgtttcctcccaccccttctggacattcctgtggatcatacatggggcacgatgaggttgaggggtaccctctccagctctgggagcagcacccagttccctgtagggtttgcttttctcccatctcacaccggatggattttaagttccttttcatgacttaggctatttagctcttggtcctttctgtccaaaagctgccctgccaggggttttctactgatggatgctacgtaagaggccgacccaggcctcttctgggtaagctattggaacgaggctcacgtacacaggtgttagccccagaaaagttgttagtttcacaatgatttgtttattgtctgtcgatcaaatgtattcatttttggttattatctaaatgtaggctcctggcatctgtttcacttgttgcttttggaatatatgattcatatacttcagtcatgcctagaggaggaagaggaggaggaggacatggggactgtcaaggaaatgctaccagatgacccgactctcggccagccagaccaggcacttttccattctctgaattcctcactgtcgcaggcgtgtgccagccccagcatggagccactgggggtgatgcccacacacatgggccagggccgatatcccgtgggtgtgagcaacatggtcctcaggatcctgggcttcctggtggacactgccatgggcaataaggtagggacaccaggacccccttccacacagctgtttcaaggggaataagagccacaggtgattagtaaaaccctcaagatcactttgtccaaacaatgataaacgattctacagtcatctttaccctaggtgattttgccaggggtgagtttaattcactatctgttgattactggtcagctcaggtttgtgggacattgatagatgcctggcatgattagaagtgtgaccatctgatggcctgggtatttcttgccttcccagagtgtgcctggcctggttagactaactcagcagtagcacaccactaacgtctgagtggcatgcactgaaaattcccctagtgttcaaagacggaaacgtcgaatagtctgaacagaggattttgaaaagattacattgggatacctgttgaaagatacaaaaattagagttactatttacctaacacctactatatagcccttatgtatgttatctcgaagccatgccatcctatagaatatttgttcttgtcattgtcatttgatggatgaggaaactgaggctcacagaagctgagtgacttgcacaaagtcacacagcaaggaaatgcgaggaaatagtggaacagagattggagccccagcctgcctgatctcaagtccattcttcacctacaaccctagacaggaggttgttttatgccctgaggagtgcaggacgcaggttgtagaggtcggacatggacctcagtaccatgaagcagagctggactgatggaggaacaactgaaatgcctccattgaggagtggggagtgggctggttaaaaaaaactgacagcgattgtcttagggctaatttctctgcacatatttgatgtttagccgctatccgccttcttctttttgtgcccacaagttccccctctcgcacagatgagttgtgcttagtaggaaattgaggcaggtgcgatcattcaacctgaagcaagttgtggcagtgagtcacagcctaaaactcttcatgccttagagtccgcagaataacaggaaccttccagggccctttccttcttgagcagactctcattgcgagttctccgattgcagagatcctgcacacctgttactgagcaatgcttggacaagacacctccctagaccaaaaaaacaaaacaaaacaaaacaaaacaggagccggggaaatgcatctctcaggtttaccagttctctatctgtatttggtctttgtttctcactttgagatagtaagtcacgtatccagctgcattcggtgctctctgtgaggtagattccaacgtttgtctgtaaatgagaaactcacctcctccacgagtgtccatgtgaaaaaagcagacatggtcgatgaaggatgcagcagcgaaacactgaccccaacttgggggtgctgatgagagctgggcctccttagctggcagcagctaaggcgctttcaggaagcaggtgtttccagacagttggcagaaagaaggcccagttagatctgaagaggcgatggcttggctaggctatacctaggaggatggctctccctgctgctgtacctggcggcagagccctccaagggccaccagtggaaagcgcctgagtgtactctggagcattctgtagagccctagcagggccagcattcatgctgggctgcagtgttcagctccaagtgaaagcaaattctttgcgctcaccggctggagcaagaggtcggagtgtagcatgacaacttgtgaaaggaaaaacaaaaacatcttgcagtgacactcgttaaagcaccgtaagggaggctttatctgtaaggaaggctttattcagtaccatctccacagggcttttgcaaccggggagggagattgggcttaactctgagtacagaagggacagggtggcgggtgcagaatttatagcctaggagccaggtgggggtcaatggatgggaatttactaagaagaaatgtcagaggtaagggggattctgctgaacccacctaagaggattcttgtagaagtccagccagctggggtgaccagacatcacctggaggctggcagaggatgaggaaactgatcacatatggagatggggcattctcgctaaagtgactcagcagggttcttgctaaaactggattttataaggaagtgggcgaaggagaaggttcaggagccagactaaagttcagccaagcggagaatgttagtcaaattatatacacatgcttcctagtcagcaaggtaaccaggagtaagcttttacgtcttcagccacagttagaaggcgtgaagagcagacgctgacagtctcccggagctgagcgtttaaatgcatcttttcatctcaatgaaataggtgttatcatcaacctcattttacagctggcataactgaggatcttgaaggggttgggtaattttcccaaggtcacctcactaatcagtgggagaacaggaatttacacctccacagatccttccaagactgtccttctcagcattctctctctccccaacagtgttttctaccatctgctttaattccaaaattggtctcttgggactaattactaaaaataccttcaaatctgataagggcaatcctggtacatacatttctgggttcaaattctacttcttccccttattagatagaacactggacaaattgcttaacttatggggatactcatgtctaattctacaggaacattatgaggtttaaatgagttaattgttgtaaaatgcttagactatttcctagaatgtagtaagtacccaataaccactggtcatcgttattatttctccaccacggcctcctaagctgagcacttcctcttaacactgttggcccaatcccttagctcctctgaagttccttgcaaagaggtttgacctatatttaatggttggaaacaatagagaagatattacatacttaattgaactacagaataaagcaatacaagcagacaaatgtcaggtaatccaaggtaatacacattagagattaattaaacctgcttctgttcattcatgcctgctgaattagctataatgacttaaacaatcacaccaaaaagttacgctcatctgattttcattgcatccattattcagcacttgcactcatcatcaacaaaaaagcacaccctgcatgtcccatctgcattcatctgccaccgtttaacacccattcagctgcacagctgtggcagcctcattccctgaacaatttagcgctggcctgcacctccggtaacaactgaagtcagcattccggattgccatacccatctgtccctcttctacattctagcggcgttcaaaatagtcagatgccaaggcgtgtttaagaacaaagtgaaaaactatactgatattaaataacgaatttaggtcatgtactccaggattacagcagagcaaaacaaatttttttaagtgtctcttcacctctaagataaaggtgaaaacaattttttgaaaaagaagaaaaacaccttttcactgggtggtgatggtttttgtcgaatttagagaaagagtgagacatgctttcatgaaccttgcatttgaagttatggtgcacacatctctgtcaaagtatactagcttataggaggtttattgatgaaatcagaccaagtgaatacatttctattggttttaaagtagtcatgaccaagtttcctggagctaagggagggatggtacattcgcctttctctgataggaagacttgctcgtcaggtgaagtggctgaggagagcttcagctaacttagaacctccccacctctcgaatctgttacttcccaattgagtcaccaataccagattgctgttttcataggttttttcccccatttagtggtttatttgacggatgggggaaggagagcctgtgtgggaatttgaactgactatgtcagctccagagacttgttgagaatgtggggattagtacccgtctggagactcccaaattgatggggggtctccagctacatggagaccgtgggtgcctttcacaggctccctcccgactttcatgactcatcttctttctccagtgtctgttaaggaagagtgttggtttgctctcacgaggacatttctcacaaactgcctttccctaaagagagcccatcagctccccgcccctgcaccatccctgccttgcaaagcctcccactgagtcctcactggaccctgagtgttttcctgagaaatcaggagttctcttagaataaatgcatgggctgggtgctgtggctcacgcctgtaatctcagcactttgggaggctgaggcaggtggatcacctgaggtcaggagttcgaaaccagcctggccaacgtagtgaaaccctgtctctactaaaaatacaaaattagctgggcatggtggcacatgcctgtaatcccagcaacttgggaggctgaggcaggagaatcgcttgaacccaggaggcggaggttgcagtgagctgagatggcgccatggcactccagcctgggtaacaagagtggaactccgtctcaaaaaaaaaaaggaataaatgcatgaacttctcctttacatcccagggtgggagcacgggcttggtagaagaattcaaatggtagttcctgcaacaaggaatagtatctgtctctttttatcttttcccttaaaacatttccctcttgcagctcatccaggtgctgttggaagatgaaaccactgaaagcgcagttaaactcagccttcctatgggacaagaagccctcataaccctaaaagatggacaacaatttgtgattcagatatcagatgtaccccaaagctctgaagatatttatttcagagaaaacaatgctaatgtgtgagattatttatttgaatagagaataagaaaactgatagacttgcattcttaaaaatattaaatactaaagtttttctattgacgaaagatgatgttatgtatataatagatgtagcattgtctattttatgtttatatgtatttcaaggaggtggtttcgataaaatatgtaaactgatttggagaataa

SEQ ID NO: 115 - DNA, 1822 bp, Homo sapiens
agagcagcgcggcagcccaagggccccggcgccgggggcggcggggaaccccaaacgcaaccgggtctggagggatccccgcgccgagccagccgccgtcaccgcctccgcgccgcccctgcgggcttggcaggcgcccggcgcgcccgcactgcgcccggccgccggctcccgcggtcccaccgtgagctcgccggcccgtcgcccgctcgccatgcaaccgccgccggcctcgcgcgcgtaggcgcccgccgcaggccatgctgcccctgctcgccgcgctcctggccgccgcctgcccgctgccgcccgtccgcggcggggccgcggacgcgcccggcctcctcggggtgccctccaatgcttcagtcaacgcgtcctccgcggacgagcccatcgccccgcggctgctggcctcggcggcccccgggccccccgagcgcccgggcccggaggaggcggcggcggcggcggcgccgtgcaacatcagcgtgcagcggcagatgctgagctcgctgctcgtgcgctggggccgcccgcggggcttccagtgcgacctactgctcttctccaccaacgcgcacggccgcgctttcttcgccgccgccttccaccgcgtcgggccgccgctgctcatcgagcacctggggctggcggcgggcggcgcgcagcaggacctgcgcctctgcgtgggctgcggctgggtgcgcggtcgccgcaccggccgcctccggcccgccgccgcccccagcgccgccgccgccaccgccggggcgcccaccgcgctgccagcctaccccgcggccgagccgcccgggccgctgtggctgcagggcgagccgctgcatttctgctgcctagacttcagcctggaggagctgcagggcgagccgggctggcggctgaaccgtaagcccattgagtccacgctggtggcctgcttcatgaccctggtcatcgtggtgtggagcgtggccgccctcatctggccggtgcccatcatcgccggcttcctgcccaacggcatggaacagcgccggaccaccgccagcaccaccgcagccacccccgccgcagtgcccgcagggaccaccgcagccgccgccgccgccgccgctgccgccgccgccgcggccgtcacttcgggggtggcgaccaagtgacccgctccgctcctccctgtgtccgtcctgtgtccgcgcgcgcgggtgcctttcccgccggagactcggccggtgtgcttcgtgctgtagttatcgttagttcctcttcccgagatggggccgccgagagaccccagcgcctttgaaaagcaaggtttgtgctgcgcttccagttccgaaaagcagatgtttaagcccttggactgagggtgggatcgcagctccgaagacggagaggagggaaatggggccctttcccctctattgcatccccctgcccgactccttccccgcacccacgtgccctagattcatggcagaaaatgaccaaatcctgtgtatttgttttatatatttaataactgttttaaatgaaagttttagtaaaaaaaatacaaaacaaaaagattaaattgctattgctgtagtaagagaagctctttgtatctgaacatagttgtatttgaaatttgtggttttttaatttatttaaaattggggggagggcatgggaaggatttaacaccgatatattgttaccgctgaaaatgaactttatgaaccttttccaagttgatctatccagtgacgtggcctggtgggcgtttcttcttgtacttatgtggttttttggcttttaatacagacattttcctcca

SEQ ID NO: 116 - DNA, 12828 bp, Homo sapiens
aaattgattcccgcacgctgcagcctcccggtcagacgaatttctcccaatcggatgaagttcaccctgggcctggggtcgcgggcgtggagagtgtcctgggagggggcagcagcggcggcggcaggccctggagcgggcggcagcgcgctccgctgccgcgcacagcgcgtctccagcccgcggctgggccgccgcggctctcggctctcgggcgccctccctctatgcctctcacgcggcggcggcggcgcccaagctctcccggactgcgccgggcccagccccggccaccccggccaccccggcgccaggcagctggccggcccgctcgctatgggtaaggggcgggcgacaggcagggctcgggagggctgatgaggtgggtcgggtccgcctgcctcccttccctctcgtccgctttccctgggcgacccagtcctgggtcctggagaagctgcattctcctctgatccccagccttcagggggcagttgagcaagtctgggaagggagtgttccaagtagacgcgctaaaagtcgcgaaagggcacggagggctacaatgcgccgcgctccactccgcggctcctctgcgcccttgcccactccaagccagacccaggcggtttgcccttggactccgagctgtctggggacccacaggtcacctttggaagtgcgcctgggtgcagtccctcgctccgcgtggggacccttggctaacccgccgggtgttttctccccctccggctcactcttgtctggcgcatccgcagagcagacgtatggcgaggtgaaccagctgggcggtgtgttcgtcaacggccgccccctgcccaacgccatccgcttgcgcattgtggagctggcgcagctgggcatccgaccctgtgacatcagtcggcagctccgcgtatcccacggctgcgtgagcaagatcctggcgcgctacaacgagaccggctccattctgcccggggccatcggggggagcaagccccgcgtcaccactcccaacgtggtcaagcacatccgggactacaagcaaggagaccctggcatctttgcctgggagatccgcgaccggctgctggccgacggcgtctgtgacaagtacaatgtgccttcggtgagctccatcagccgcatcctgcgcaacaagatcggcagcctggcgcagcccggaccgtacgaggcaagtaagcagccgccgtcgcagcctacgctgccctacaaccacatctaccagtacccctaccccagtcccgtgtcgcccacgggcgccaagatgggcagccaccccggggtcccgggcacggcgggccacgtcagcatcccgcgctcatggccctcggcacactcggtcagcaacatcctgggcatccggacgtttatggagcaaacaggtcagttgtggcggcctccgtagccttctattaaggggcagaacctggggcgggcaggcttgcaggagaggactcacactcgctctcctcccgggaccggttctggctcaggggagggctccacactggccagggaggctgggggtcctgggccttttgtaagagacctcggacatcttgaactttttatgacaaatatggaaaatatttcccaaatagaagagcaatcgccgaccacaaatttggaggcctgaaattgtgctttttcattcttgcaaaaagtatgcaagcccctgttgccaaatctaagggggaaaaaaacccgctcaattttgagaccctttctttagctctcagaatccttcacgatttcccaagggttctgtcccccactcccaggcccagtggctcttctgagttaaaggaaaagggatcttgtggtcgattgagtggcctacatctctaaggtcctgtggccttgcaggtcctggagtttgcggtgatggctggtggggctgcagccaccttcacaaggatttgtcatttatctgcaactaaagcttaacacactataggtcaagtgggtgacgaggaagatggggaaggcgggaggtttggaacaactttgatgcctggctgggaaagaaaccagccagaatcgggtctggatttctttgcgctctccccagctgccagcagctggccaggggatggcacactcttaggtgatcagactcaggaggagggcaagaagcaaaattcaccatagcctaggaggaaagagtggtggctggaaagaaactgtgagtgctcagctccagcagcagcagcgcctctgtggccctgctctggctttgtgtctcctggtggctctaacccagcctaaggctaaagcttcccatggaatggcaggggtctggaggtgaccccaccaagcctgcacgcagatctggaggtttcccttggttcctggcacacacaagggcccggggagcagctgtgtgcttctatctgacccgtggggacaacaatgttgacgcttcttttgggaaaccctgggcgtttccagaggcagttctcgtagaatcgtctccctgccctccagaggcttgtgcagatgttgagaaatcaatacaattttcatgaggttgctgtagctttgaactcggaagtttctgggagccgtgtctggacaatggagcggccgctttggccgagtctgcccaggctttgactcagcagcagcctcccgttcgtgggaaaccggttgaaggctaggaggaccgggcagcaggcctggctgcctttcctccgccccacccggagtggtgaacattccagtccctgccgcctcctggtggagtgtcaggccacctacaaattttgtgggacccctggccgtgtcttcagatacaaattgggtggttggccacacgtgtgcccagggcagattcggaggcaccttttaatccgtcctctctctcctgcaggggccctggctgggagcgaaggcaccgcttactctcccaagatggaagactgggccggcgtgaaccgcacggccttccccgccacccccgcagtgaatgggctagagaaacctgccttagaggcagacattaaatacactcaggtaaccaggaggcacgtgaggccgtgaccttaagtagggaagcagaaggtttgggcaagtggggaaaaagagagagaaagaaaagaaaaaatttccaggcagagagatggttgtatctggcagccggctagcaagcgtcctttctgtcctttcctcaagcgtactagtttgggagagtctgactttagaggggttgacttgcctttgccaagatagcttagctaaaaaaagctggaactccagatgacgaatccacagtcaagggccttctttctctaaatcccgatatgaataccatgaccccttcacatcgttatttgtaacagtttgagtgaattcttagaaatcactttgccaaagagtcctgactaggaaatttagaggccaggcctcgcatggggataatggatgggcacaggacgtgggggagcgataatggacgaaaacccccgtctcagtgatggcgtgggctagagaaggcaggattttctgctgctgacggtccctctctatccccacagtcggcctccaccctctctgccgtgggcggctttctccccgcctgcgcctacccggcctccaaccagcacggcgtgtacagcgccccgggcggcggctacctcgccccgggcccgccgtggccgcctgcgcaaggtcctcctctggcgccccccggggccggcgtagctgtgcatggcggggaactcgcggcagcaatgaccttcaagcatcccagccgagaaggtgaggagcgcagggagtggggcgggtggatgctggaagggttaggaagggtactggggagcgggtgtgagcctgggaaaagggagagcgggtggggaagaggtgggtcctgggcatgaacccttcttctgggttaacctttgagcatgtagcttcttggagcagattagttctgacaggtgtccctataaaggtacccgaggttgagagagactggccccaagactgtcccctccacttatgatgggagaggtgaaaggaggtccttctggcacacaggacgcgtgggtttggatccggttctggcaccttcgaccaagttcctgcttctttctgggtttctgtttctccatccagagacacgtctagcaggcaccctccaggctcacctttctgtagacctgttctggcacctaagccctttaggtggggttggacttgctagtggcacctaacctccatccccagacccttcccgtctctgccccactgcccatctgttttttccaggttccttagagagaaaaaaaggcgtttggattctttttcttaaatacacactgtgggaaagtagaggccatgtgaatcagtgtcctttactccaggctcaggagctttctgtggttgtgggtggtggtggtggtgggcgggtgggggggttctctctttctgtggaaaatgtgcctgggagtcttgcctccttttccgcttcctccttctcttccttttccataagtccacttcctgaaaagtcgaggaacagattttaggtatttcactgacagtcagcagtgtgagggggatcttctcacacaaccaggagggttccagtttttcctttaacttgggaaaagctcaccagcccttgagtcctcattttctttgttgttaaaaggaatggcttgatttgctaagttcaaacttgccagtgcttaggttctgagcaccagaaatttgcaacttcaaccaacctgggaaaggaaagggtcaccccaggtcgtcccagccccagcagagaaagagacaaggcacaaacctgggggacagcgtggagttcccagattataaaaggatttttactagctgctttgcctccacctgtccagggctggaagcgaggtggatgtagtggcaggtggcagtgggcaggcaggggacaggagggccatcctccttggtgctgcccaggcaaaaagtgctatttccaagtagtcttgataagataggagggcatgccctggggagtgggggtggggtggggggcaggaaggaaataaagatgccatccacaacagtgaaatgaagggagaaaaatactttttctatttctacctttcctagagcacagacatcctgggatattaggataatgttcacttgcctagttacagacaaatccaaataaggaaaatttataaaaattgggatttagagctcttttaaactttaagtttaatttaaataggatactatcatttactcatttatagaaaaatccaagtgaaggaaatgttaaaagttgagagtaagaactcctttaagctttatgtttaaggatagttaaggggtcgcagatgagcgcttcactcatcctcagcctccaatcaacctgttttctcaacaactgaggttatctgtcgaaatcgaaatcaaaataaaatttaccacattacacaaatcacttaaataagcaggttcttttgaattaaaaatgtataaccacagatttgaaatatttcactgggttcatcttaaggagaaggaagacttagaaaaaagacccacagtcttcagaggaatgcatttgttttcaatagagccactttgccctggaggcattttaagctctacattagacacaaattataaagtgcagataataagccaaaggtaacacacacagttcctaattctaaactacctgtcttaatttgtggtggaagttgcggggaagctgattttaacattaagcctcactggtgattgattttctttagaagacactttccttttcagaaatacagggtcattgaatggtgctggcataagtcccttttaccattatatcagtttcctattatgtaatatcccacctgtttttaaaagctacagcaataatttgttactctagttattaaattaataatttaattttgtggtcctccaacttctttaaaggttctaataaaagataatcagataacttggggacaccattagcaatgatttctcaagctggcatgcaactgtttgtgttcgaacaggaatgtagaaataatcattcattatctatctatattcatagcctgagaattacatacatgcttgggttatggatttttactccttactggtagaacagctgacttcaaagatctattccctcaacacaactggtctttggaaagacagaaaaataataagaatcactgccttttattttctgatcagttcttaagaaattaatatcttcaaagaaacctgtcccagaggacaatttactatcagcaattgttcaattcataagaatagtgagaatagtatttagtgaactccttttcagtaagaaaaaattcttctgtgtaatgaaaagcaatttaatacaataaatgctcagtaaaagcaaatacctttgatcacctaacacatacacaccacacacgcacagtgcaatatatatcaatatgtcctccaaattagtgcaaatgaacagcttaacagttaccctaagtgaaacttaatcaaatgtcaaatcgaaaatttagcatttaattagatattaattgattaattgtgttatttaatactataattcatttttttcttattttttaaaaaggtagtgagtctgggtttcctattatgtaggtaaaaagcatgatttacatttcccatcccctgaaaggaaactttaatttttgggaattgagaagaatagaaaaagtttcgcttaatcttcacttggagaggctgacattctaggaatctccacccacatccaaatgtcttttcatagccagggcacgaccatctccccttccccacccttaggtgacagacaccaccagatgctccctcaagacagctggtatttacaggatgttttcagagaccctcgaaacctcagggttttaagtccctcctcgtggggctctggaatgactaaagatttggaaatcaaatctataagatactgcatacgcacaaagaaaatgtattgcttttatttgttaaagataacttgcagcttcgctccagttacctctgcctcgggattggttcttggaagatcctaaaagtaaactttgtcaaagagcactaggtcgctggcattgtcgcacccggacgctggcaaccccggcctccgtttgacccagccccggggatcccttcccagacccgtgcctcccctcagcggtggtctcagagtgccctgcaattgcagttgaatatttaaaaaatgcctctccccattcttagcccctgaattaaatgagcctgacctaggccccggcctccgagggcccagaagtacccacccttgttgtcctatggagggaatggagggcaggaggggccctatgaggaaggatggcttggacagggctaaaaacacagcaggattcgcccctgtagggtgggatgcagtcttcctgggtgtttatttttcatgagttcagtttcttgcttgtctctaaggtaaccgtcccttggctgagaaacctccacctcctcagatgttttctaaacaggtcctcactttgaagtgtgtgtccacggtagaaagaaaaggtctgaatacttgttggctgggcggccacaactttgtttaggaaaaagagctgagagccagggaaaagcagaggggccgctctgtcctgggaaggtctttagacctctttaaaacctcaacgaaaccgtgtgttttcttttttttttgtgtgtgtgtgtgtgtgtgtgtgtgtgtcttgcacagaggtggttggcccagctctgcgcagccacagcaagttgcgcctgaggctgaggcgagggaagctgcaggagaaaaaaaaatccagagttccccttacttcaaatcgaggcgctccaagctccccctttaaaggaggacttggggaaaaaagaaaattgaaaataggcccctgtaggtataaacaaactgtggatcctagtgtaggagaagcagagtggctcaaggttgggaaaggaaaaacaggcttgcgcaatcgtggcgtcactttctggcttccggtggcaaaacttgggccccttcccaagcccctaaataatagagtaaggcgcagaatactgcccgatctggcaatcccactgtcacttaatccggaggcccacaggtcccaggacgtgctgtgcccacagtggtgagcgcatctggatccccggacctcgtgggcacaacgtagtctgccgctcacttaaagcgcaactgcctcctacgtcggaggaatccaggccgctccagggaaatctctggtggctcatttcccgcaagatttccccctgcccacagcgagctccgagccgcgggtgtcagcggactcgacgcattggctgctcttcgcacttgtgcgggcgcctggggtttggaaagggtgagggtccgcgcaacgttagagtcctgttcccttctgcggaagtcgccatcagacctgaaaccttcccagccctctgcgcccttcacttcctttactgagcaggtggtgagggggttggacggcaacgggaattgcacctggccagcggtcagtgtttgcaaatggccttgcgaggagtcccgcttgccaaggctctccttgcaagtggctctcctagcgggagaggaagggctggtcgcccacggaagcttggggtctctggagagcgcgagtctctgcttcactcttccagagccttcaagggttgagcgctcacgacctcgctctgcaggcgtcctgagtcccagtgcctctcgcactgcgcggcgctaggtagtgatccgacgcctctgtgcttcctcccgcagtggctgacaggaagcctcccagctccggcagcaaggccccggacgccctcagtagcttacacggactgcccatcccggcctcgacctcctaggggcagctctccccggacccgagcccggagggaacggcaggcggacccgggcgcacaggtctgcgcggcggccccggcaatcggcacgggcaggatcggaggactcgcggaggaggaagccagtgccggcccgcggggtgcacgcccagccagcccccaggcccagccctgcctctggccggacccaccacacttcctttattggtctgggtttttaggcttctctgaacttgggttttagactgccgtaccctcctcacaatccttgctctgacgtggcctccttcgctctgccagcttcaaatttcttttttgtcactcccttgtccgtctccgtctcgcctctctccctgtttccttcccccctctttctttctcactctccctcccttccctttctctttcccttcctccctaccttccaccccggctttccccgaccttccagggctccctctgcccttccactctcttttccttgctccgacctctgctccagtcccgcttcttcccccgtctcctctttctagtcctctatatgctatcagccctttttcctggtccatccctgtcgttccttctctctctgtctctggttctactgtcaagggccctagttccctttgttttactgcttccccaaccctccctcagtccctgagagccctagagccatctcggtgacagtcccttctctggcacctgggactttgtagccttcactcctctgagcccaccagccctaatggaggggggctcaaacctaggaagtggacagaaaagccacagcctttattttgtattttttttgtaataacaaaccctaaaaaaccctccatgaactgtcctctcccgtcgatccccgcagcatattgtctggaaatctgttttctttctcagagcccagtggccgccgggcttctcttcccttctgagatgatgtcaccccaaagaagactggggtaggagtagggagcacaggggttgttggtgttttcagtgcttagaaaactgggttgtcctgcaggtgtctcctcccacccctccactcgcaacacttgctagggaatccgaccagtggtaaacacatcagcactttttggtgttcaggggtcagcacatttgttaatttaaaccacagactgcttccaggtacaaaggttcatttggacttctggtttgcaagggatgagggttaaaaaaaacaaaacaaaacaaacaacaacaacaacaaaaacaacccagaaagtatcttctagagccagccgcaagagctgtgagctgcttccaagttaggcgagctggtggtggtaccctggacataatgcaattctgtagtcagagcaatatccctggcgagagcctgacatcgcctgttaaaggtggctgcctctgaataaaggaaagcgtctgaaaggtgtgtggtgaggtgagcaagtctgtttctgagcgcagagtgttgagttcttactccgtagctaccctctcccctgagttcctaggatgaacactatcaagggaaattatgcagaaaccaccttgaaatgcagttaattctgaaaagagtaaaatgggcaaaaggcaatgagccagaatggaggatttcttcagaacatttctagtattctaaaagctaaagaagacaatcccaggctaccaagtaatctagggggtttgcactacaaaggggcttccggctaattgtttttttttcctgcctctgtttgaccttctaaaactgatggaagagatttttgaattgaagttgctgtttgtgagtggagctgcctgcttggtgtgtgcactggtcccacctaggggactagtggtaaacagtttttgtttcaactctttttgatagtatctgttgaaggtatcaattataaaaaagtacttacttttttcctagagagactcttcttctcagattcaaagtctcttgtctttttttttttttttttttaaagtttcactttgtagacagtgttagtgatggctagggatttgatttattttctttagaccacatagcaaggtatgaattagagggcttgtgcttggaaactgggtgacactatctcatcagagaggcaggattgagacttggactttgagactgaagtcctcagccttccatggcagcatatcctgtagaagagcttgtcatactgataataggaaaaaagtatgacagagaagcatgttcccaagtcccccatcctctcagcctgtctccttgtgcttagatgagcattgcatgctcagtggtgacatcctggacagaattttcatgcacccatttgtgctgcctggagaaggactggcttgctcaggccaggaggaagacatcacatccctttctgaaggaatgagaagaatctatatgacaacttctacctttgagttgtcaccatccccatttccctgctatggcccacttctgtgtttgagctgatcagggttatgggggagaagagctgggaaatgcgccccagggtggatgcaaagcacctgtgttttaagtgccacctgcaaagggaggcatttttcaaatctgcctcttgttccctgtatcctgtggctggaggcgggtctttgagttccctggctctggggcgagcattcactgaggataggcagccttcgtcccagagccagcaggctctgacatttcatgtggggtgtggagggacataccccctctctcgcggctgggggtcacggaacatcttagtgaacttggcttaaatctctgctccactgtatgtgtcaggggactgggacctcttggaacctgtctgtgaaatgtagccttcaatgcagtaacgcgcacggtgacctggcctgtaggaagactgccactggtgtggcctcacctctctggagacaattttgcttatctgttaacaaaagttagaggaatcacttgtaaggttggtgggagacccagaatttaaatattttccaaaagatcccattggaatattgcacttttgctctttgttcgtatggatctgtggaggaactgagagctcataataaaattatgcagcaccacgtcaggtagaataatttgagaaacaatcactccctaaacgcagtttgtctttgcctttcatttttttaatttaagaataagttttttttagaaaaatatagagatgtaacccaaagaaaataaagacataatcagatagccctctgattttttgaaagaatagaaataatatatgcgtatcactaaaaaactcaagcagtacagaaacattaaaatgaaaagtggaagttcttcctgctctcatttttgttcttaaaggtgaatgctgttatagtcttttgtgaatctttccaggaaaaacatgcatgcgggaaaatatgtttctgtctatgtgttatttgaaagtgcacactaatgagttgtgctgtgcacacacagacatgagctgaagatctgctctttgcgtaccaccagcttcagctccaatgtacccactttattctcgtgaatggatgtctattaccgaggatttattaaaaacagggtatttgtaaagagggccagcttcgtgctttaaatgaataaagacaggattttgttgtgttcattattggaggaagtacttgcaatggattgtaataacttccctgccaaaggtagctgttttttggcaagaagtaaggaaaacaaaccaaaggaaaggaggattgaggggcaagaggcatgaagttttgcccttcttgaatatgccccgagttgttctacagatcactgaagggcatttgaaggtgtgaggggaaggcttcctctcctttggagggagtcagtctctctgggccaggaaagagacatggaggcagaggggtgcgggaaaaccttgtgtgaagaaatactggctacaaataaagtttagattttcaatactg

SEQ ID NO: 117 - DNA, 6697 bp, Homo sapiens
gcttgcctgcaaacctttacttctgaaatgacttccacggctgggacgggaaccttccacccacagctatgcctctgattggtgaatggtgaaggtgcctgtctaacttttctgtaaaaagaaccagctgcctccaggcagccagccctcaagcatcacttacaggaccagaggtgagcatgggggattcttggttacttttttttgaaggactagacctctgctttatttgtgaaaaggggtcaaggtggggacagcagaagtcaatttttttgagtgttgatgtagggacaagacatgactgtgatgaggagctgctttcgccaatttaacaccaagaagaattgaggctgcttgggaggaaggccaggaggaacacgagactgagagatgaattttcaacagaggctgcaaagcctgtggactttagccaggtgcggtggctcacacctgtaatcccagaactttgggaggctgaggtgggcagatcatttaaggtcaggagttcgagaccagcctggccaacatggtgaaaccctgtctctactaaaaatacaaaaaaaaattagttgggcatgtgtttttgatattttcagatacaaaaatcccagctacttgggcgactgaggcatgagcatcacttgaacctggtaggcagaggttgcagtgagccgagatcatgccactgcactccagcctgggtgacagactgaaattctgtcaaaaaaaaaaaaaaaaaaaaaagcctgtggagtttgaaagaacagaatgaaaagacattgagggagatgctaaagcatagcccccgtcccccgtgacccataacccaggggtcgccgcctccctagcccaggtaccagcagaaccgggtcttctctggtcttcctcccggtgtaggggtgggaggcagtttctttaggtgtcagaccagtgcctgcagtaagaaaggttcttaaatgattgtgtaaagaagtacgaaagaaagggagaaagtaagaaagggagggagcgagagaggaaagaaggaagaaagaaaggtaaggagggagggagggagagagggagggaaaggacaaagggcaaagaaggcagggggaaagaaattctctgcatcagttataataaatacataatggcgttaggttccccagcttggaggctcttcactcagtccttcccaactggcacttcagaggaaggctttagagatgattcatctggaaatctgatgcctctctctcatttggttactaaaaaaagtgaatttttagactcaagagtgagtggttagtggaggtggcatagtctgtgtgtgaccctgacctgccctctgtgcccctccctgggaccaggattaaccccttgctcccttgtgatgaggagtgagggacagccgtctcctggggaggagaaaaagacctgccagcctatgtgtgcctagtggcttcagggcagaacttggataagcacatgtctagttcagctctttgttttcctgggtttgggctccccagacgtggcacattagaacctcccatttctccactcttctgggtcaaattctgactcgcaggttgtaggctagagagaactgcgatggagaaggaggaggtgcagggcgtgtgggtgtggacgggcaaggtggggaagagcaggtggacagatggcaagacgagcggccttaagtttgaggggcagaaagacccctgcttcacccccactgcaccttagcaaggctgccggtttgcaatagtctcaacttgcccattggagagtgctcgagattggcccggggagaccctcggagcattttcccagggcatgtaactctgggtcagagggccggcctcacaggctgcctccctttctttcagcagacccttctgccctcctttgctggcgacagcctctcaaatgcagatggttgtgctcccttgcctgggttttaccctgcttctctggagccaggtatcaggggcccagggccaagaattccactttgggccctgccaagtgaagggggttgttccccagaaactgtgggaagccttctgggctgtgaaagacactatggtgagtaaagtgctgttctggacccagtcgtgggggttcctgggggcagtgggccagtggggcgaggggatgctattttatgattctggagtccttcacagcttgctaatcagtttccagtttcccatataataactctgtgaggtcagaaggcaccacaagccccatttacacatgaggaaattggggctcagaaaaaatgtgggcagcctcgagtgaaataagcagtgcccaagggaaaccatgaagagagctagattcatccaggcttcgtcccgaatagagtcttcggctctaaatctgagaactggaatgagtggctgggctgtggaggaagctccaagggcaagaggcagctctagggtgcaggctgtcctccctcacatcctgcttcctcaccacatggaatatggagccaaaatcctgcccatagtggttcttaaagcagataggcttatttcctcccatctcaaatgaccagaggcatcaaactgcttccttatcaaatctatgttcatgctctaagaataagaagaactcctgggactccatttgctcctggggggccaagcttagtcattttcgtggctgcaaccttgtctcccctccccatgggccagctcagcccagtccttcctgggtcctcttttggtccctctggcctttgagatctcacagactagatagatttaggggtctagggaagcagcacatatttgcagagttggtttctatgctgacccctaacctggagacgtcttttctttctgtttgccaagcaagctcaggataacatcacgagtgcccggctgctgcagcaggaggttctgcagaacgtctcggtaatcagacctcggggacaccaccctctgtgggacgggtctactgtgggtgggagtgcaaggctttcttaggggaggttgatgaaagcccttcacttcttccctggactgaccttacacaggacagggccagactgtgagccagggaagtcagtgtctggggttattgctatgtggtatgtgtgtgcagtggtactgggagatggggaaggtggaggcttgtaaacatctttctccatttagccagagaattatatatttctcttttacttgtgtaggcccaataggcatctacttaggttcatgtcctctcttccattttcatccttttctctgggtcctttttcctgggtcctcctttggtccatctggcctttgatgtctcatagactggatagatttagggggtccagggaagcagcacatatttgcagagctggtttctatgctgaaccctaacctggagacatcttttctttctgtcatgtgagctcatgtgaagtgagctcatgacttaaaataatacctaacaaaaggattcatcctttctttcaccacaatcaggtagagtatgttatcaaggatgggtcaccatcttctcatcatccatctagtgggcacaaacctactgagccctgagccctgaaagatgtggcacttcaggagcttgagggggctagagtgcaattgctgtgtccaaagatattagtttctcctcatttcttctgttctcagtcattttccagcaaactctatatcaccaagtccaagttcaagcccttttcagggtccatcacatccccatagctgttaaagaggccatgtggcatagaagaaagagaatattaagcagatgggcagtcaggaatcctgggagctaggctgtgtctgccactgattgactatgtgaatcgggccaggtcatttctctccctgggtcttggttcctcctctcaaacaaagacctgctctccatggcccctgaaggctcctacagatctaaggttcatcatcaccttctagaagatccctatctctgctgtgcttatcttgccttgggtggcatgtgggttgttccttcagggggtcagggtgggcagaggccttggctcagcagtgacccagaccttccccaggatgctgagagctgttaccttgtccacaccctgctggagttctacttgaaaactgttttcaaaaactaccacaatagaacagttgaagtcaggactctgaagtcattctctactctggccaacaactttgttctcatcgtgtcacaactgcaacccagtgtgagtagcacacgctctggatactggcagctctgggttcaagtctaggtctgcttccaatctgctgggtgaccctctgcaaagtcctccacctccctgggcttcagtttgttatctgtaaaatggggatgatcactcctgcctggcaggattgctgcgagaattaaaggaggtagcccctttcacaaggtgggagtttggtattggttaccttggggaatgcaggattcagccctgggctctcaggctttgggagaccctgtggcatcagcaggaaaactgagagggagtttgcatctgctcctatctaaaaattggcacaacttcttttcccatgttatgtagcaagaaaatgagatgttttccatcagagacagtgcacacaggcggtttctgctattccggagagcattcaaacaggtaaggccaagagctgagagcttgcccatccagcagaatagactagtctgcaccatcacacgagggcgcctcagagacccaatgcagaatgtaatgcaggggacaccatcagctttgctccaaagccccctgacttagcaggagcacagttatatttgcagaagcatcgtaaactaagtggtcttttttcttccagttttcaagttaaagtgcttctatatttccctacaagatgattttacgaaaggaactttccctgtgttttgtaggtacttgggctgggcaactgaagtcagaagagagggagaaagaagggagacaccccacccccacccccaccccatacacatctgcagtattttccatgatgctcaactggtctagttgtgaaaaacaattatgggaaattatttttgcttttccaaaattatgacaacaaagaaaacccaaatttcatccccagcccccctaaaaacataaatgatttcgatcacttttttttttttgaggaagagatgcatcagcttttaaataaatggtgaagagcaataacatctgatggagaggggccacctgggctcatttcacctgtgcagtggattcaggtggtgggccatatccatcccatactgcagtttgtggttgctgttgttaggggtgccatatgtctttcccttgttctttgtccactgatattcactagcctgtttgtcctcacccctgaagcagataaacacatgtagatggaggaaaagtgacaggcaggtgggttcatcagtgggctcatcccaaaggtgacccatcccttggattggagtcaggtctattttaggcatggcaggttggaagaaagactattctcatagctaacatggctgaccttcaaccctcttttccctttagttggacgtagaagcagctctgaccaaagcccttggggaagtggacattcttctgacctggatgcagaaattctacaagctctgaatgtctagaccaggacctccctccccctggcactggtttgttccctgtgtcatttcaaacagtctcccttcctatgctgttcactggacacttcacgcccttggccatgggtcccattcttggcccaggattattgtcaaagaagtcattctttaagcagcgccagtgacagtcagggaaggtgcctctggatgctgtgaagagtctacagagaagattcttgtatttattacaactctatttaattaatgtcagtatttcaactgaagttctatttatttgtgagactgtaagttacatgaaggcagcagaatattgtgccccatgcttctttacccctcacaatccttgccacagtgtggggcagtggatgggtgcttagtaagtacttaataaactgtggtgctttttttggcctgtctttggattgttaaaaaacagagagggatgcttggatgtaaaactgaacttcagagcatgaaaatcacactgtcttctgatatctgcagggacagagcattggggtgggggtaaggtgcatctgtttgaaaagtaaacgataaaatgtggattaaagtgcccagcacaaagcagatcctcaataaacatttcatttcccacccacactcgccagctcaccccatcatccctttcccttggtgccctccttttttttttatcctagtcattcttccctaatcttccacttgagtgtcaagctgaccttgctgatggtgacattgcacctggatgtactatccaatctgtgatgacattccctgctaataaaagacaacataactcaagtctggcagactttcttctctatttctggatgaatgcccagtgagactgtgttgtacagctagaaaaggccttcttcccaatagcaaggctgtgcatctagcctcaagctctggctgaactttgtggtcgacatcaatctaaagatacagtgtctgactataaccttgttccaaaaacctaggcaaagagtatatgtaggaggtgggatatcacttccatgacataagtgctattgcagagccgtggccacccaggaactcctgactgctttcc

SEQ ID NO: 118 - DNA, 8081 bp, Homo sapiens
ttataaagctaaagatcacaacttattttctagatatatcatacgaaaatgaaaattataattcttcttggattcctgggagccacattgtcagccccagtaagtgattttatggcactactagtcccactgtgttaaaccttcaacaatcccttctttttactatttctgatttttttttcatttttacttttagcttatcccacagcgtctcatgtctgccagcaatagcaatgaggttagtttaaataattaaaacaatctcctcctttttttaatggaaatcaagtgggaagagatagaagtcgtcatttaatttatactgtgttcctcaccactagcttttatgtatatccaagcacatttctaatgtccatgtttgattatataacaggttacctctaaaatattattctgcttcccttgattgattgttaattcttcaaaggcggatacaatattgtttatatctttttgttctaataacacctcacacaggtgtatataggtgtttaaaaacataaaatgactaaaccactggaatgtgctaacgttgtgcaatctcatacccaacagaggagaggttgttaaatcccaaccttgttttaaatctaacttctaatcactgtaatttaatgtaagcctagtgagaaaatgtcccacttctaacaagaaattgagcaaccagctatgacttgtgctatatttgcagtaaacattgttcctactcattttagtgtgtagtaatcttgatttcatattatttttctttttctagttacttcttaatcttaataatggtcaacttttgccactacaacttcaggtacctccatttcaataattactttatggggaatatttacctattgctcatttatgttattttgtaagaaaacaaaatgtttcctgatcctattttggaaatctcagtttttaacattatgaatttgtctcatatgttctagtggccatttgcttgaagattaaagtaaaaactgtaatttgaacaacacttatttattgagaacttggtatatgccaggcactaattctcacaactatgagatagttaaaagtaattattttacaaaaagtcatgcccagttaaccagtaacagcaggttggcaggtttagggttaaggtaggggaaaatacagacggtttaaaaccagtgtggcatatgcagatgttgggctcttttatcaaccttatcctgccccatatttctcatggccatcgggaatttagcatttgcttcgtattatttgcttggttcaaaatgaatcaagatgctgtccttttttatgttgcaacattggaactatagaaattgtttgtattttgcctctttcttgctcaggactaatttttaaattctttttggcatgaagggaacatgctttctttcctttgtgtctttttagggcccacttaattcatggattccacctttctctggaattttacaacagcagcagcaggctcaaattccaggactctcccagttctctttatcagctctagaccagtttgctggactgctcccaaatcagatacccttaacaggagaggccagttttgcccaaggagcccaggcaggccaagttgatcccttacagcttcaaacaccgcctcagacacaaccaggccccagtcacgtaagtcaggcctctttcattttgttctgaggagagagaactgcatgtttaatctgacaatgaatatgaatcagctttgaaataggcaggggtttttgaacaatattttttctcattatatgtttctaccatcgctgtaagttctttcttttattttctgatttctaagacaaaaaatatttaaatcagctactctaggatacagcaacaagccaaaaaagttaaaaacaagtctaggataagataggaaaacttcaataataggcagtttatgtcagcacatgtaacggatgactttttgttgtggaaacttgttaacacaaaggataaatttatatggctagctctaggaaaagcagctcagggatttttaaataacaaagtcaagcatacatttttatataattcttttttttggcaggtgatgccctatgtattctccttcaaaatgcctcaagagcaaggacaggtaaatggatataacaacactgcccatagagatggctacatacactctccacaatgctttctatttctagctctgactcctatagcagggctataaaaacctatataatgatatcactgtctagataacatcattgctgggctagtatcagtttgttgatgttgggctcacttaacaactccttaaggacaggcagctaagtagagtctccaggacccctgaatttccagggcattgctatgttgagagtaaaagagctcagtaagccccaggtcatgtcctctctgcatccaaagtgctggaagttgggaaaaactcaagagaaataccatgggctgactttatccaaatttaaattttgcttcagaaggagatgcactaagctgataatatatgatatgatgtagagataagaaacacttgcccatgttatttggctgttatgaaattctgctcaaaacattttaagcttcttatacatttccaatttgaatccatattacaatcaaatggtaattttttccattaaataggataatcttttaaaaatgaatgcaaactagtataatcatcatattaatatggaaaaccctataaatatcaggattattaattttacaatattctgggttcaaagaaacagtattataaataaattatattactcatcacagaatattggccttttcataaaaagttacagcatttgactctactgtaattataactaaataactttgtcccacatccactcccattataaaacaaaagttacttctagacattatctcattctatgacataagcatttaaagaattagatgtataactagaattacttcatcttaagaatcaagaaacctagtcttaatgagatcaaattcctcatcccattgaaagtaaatagctgagttggaatataattctccaccccttctgtctcctttaaccatgaaaccagtagctctccatcctggctttacattagaatctctggtgtttgaaaattacagacgtctgaaccctaccccagtgaatcaataccccatgaatagatgttaagtttggtcatcttctaaaatgctcaaatgtgagtttgattcttagccaggattaagaatgcttgcacaaaatataatcctcctgaaaccctagttgttttttttaacttcatgtctaatacaatctcttactttatgcaaataaaaacagcatacaaaaattaacatatgtactaagattctcattttctatgaacacatacacaaataaacagacacagacatataagtagaaggcaatgataatataaatggaagccacatggtaatgtaggtggggaagtttcagatgatttcatttgttacttgtctatgtcttgatttaccaaatatcctaaaatatatatggattattttaataaagtagcaattcttaaaggcaatacattcatagcatttcatttattatggcagaacatctaataccacattctgcagaatgatgattctcaaaaatatagggtaagtgctacataggctatctttcacttaggtatttgcaaagtaatttgtatataaagtttctaagatgtcctttgaaaaaaaaaaaaagctcttctgcttagttcaacccactatttcctaaatgtgtttgcccaagcaaccttaaaaaccaagtccagtattacctgggatacaagttgtttccaaagtttgggaagggattcttcatctatttgctttgtatttaatcatataaagctgctagacataaaacagcttttaaataaaattgacattagaagataaaaagtatgtcctatgctgatttaatggaatctcttgtatccttctctttttacaagtagatgtttcaatactatccagtttacatggtcctaccctgggaacaacctcagcaaacagttccaaggtcacctcaacaaacaagacagcaacagtatgaggagcaggtactgcaaatgttttattttaatcctactagttccacttgaaaatagagaaaataaggtatattaccatagaaaaaaagtttctgagtatatttaatgcaaacactcaacagcatgaaacaggtaggcataagagggtaggtatagtgttctcggctataaatcatttgtgtaaacttatttggtaatattccagggctggatttttagccaatgaaatcagtaagtggacttcaatagaatcaaggccaaaaagctgaataacctcgaaaagtgaagttttctcacatttaaaatttactagcatccacctttccacatatgtgtgtgtggttactatttaaaaataataaatggcaaaaatattagctaccttgatgaaagatatatctgatcactggattttgagatacaattagataccattatattaaattttgtgaaactgcaataaatttttagaattctaacataaattcaggtggctcatatattattaacatccttcctgttagaatgaaaatgtcttttttttagtttaatcataactctaaaacctggcattacaaattagagaaaactcagaattatgctttaaaaaactggtagtattaattctaattgtcatgttgctttaaagggaaagagagagttttatcctagaaatgatatggtattaaaaagattcttgttaatttaacaataattaatttttagttactggaacatataaactttaaaaatgcttttaacttatataaaaagatatataagtttaagtaatcatttactgcaaacttacgacaagaataatcacagaaaatataatacattttttaaaaaatctgacagataccattctatgctcaatttggatacattccacaactagcagaacctgtaagtaaatgcatatttttcattaaaaatattttgaaactacttccttcattgtctactaaatctatcaatgcccttcagccaaagatgaccaggagcgcacctctaattgaacaaaattgtatgtatccactcagtacaaggaggagaacacacacgtggggattcttgggtgtcttaataggaaagtattagaatgacttctcacatgatttgggcttcttttaggtaatttggggaagattgcaaagaagtggttgttcactctgcagtggctattctcaaaagtagggtagctctatgattattttaaaagctcatttctctaaggcaaggatagtggagcaaggtgaaagctttaatgggtaaagaagcatcagtcgctcatattagccaagatgtgagaacacctggtattttcgtaacttgtatggtgaccttacttcagacaaaattttgaaattgtcttgttttttccaccccttctgatgttggtgttctgtagaattctttatgctcaacaggtaagtacctggtcctagtagagaatgttagaaagtagcactttcagaacagaagcagaggcgagatgtcaagccagttctctaatagcaaaaattaaactattatttctgtttttagcaaaataatttaagaagtttgggagtgttttactactctggtactctgggtggccaaagagcatattttcaacgatcactgatttagactttttaaaactttttgtgtttttaggctatatcaggaggacagcagcaactagcttttgatccccaactaggcacagctcctgaaattgctgtgatggtaagattccttacaacactttgccagctactggaaatcaacaattgacaacttactgcactaatgttcattttaatatcaactctgttgtaattccatcaataatttttgcttcttcttcttcttacaatattttgccagtaaagattcagttcactcttactcagttcatcagtatttttaagtatgctatgccaggtactctttgatgcacctttatttaaaagcagatattaagagacaatgtttgctggtatatattcatggtcttttatgtagcttataatctaaaaatactaataatagcaactctttttttaatataatgcttttgttacatctcaatcctgttgctttacattcttcccaattttggccttcttgttgaacttacgacaactttgttttcattctcattctctgtagtcaacaggagaagagataccatatttacaaaaagaagcgatcaactttagacatgacagtgcaggagttttcatgccctcaacttcaccaaaacccagcacaaccaatgttttcacttctgctgtagaccaaactattaccccagagctcccagaagagaaggtagagtcatgaaaacttcactttatgcaaaaaaattgtctaatgaaaaaatacagtgataaaattagtgctttaatttataggacttagtcatgaaattaagaagataactaatgaaaaatatgtggtcttaactctgaataaggtggccaaaacttgtttttgataatcaattaatcagaatataatttaatttcaatttaataacagtttcttatgaatgtccttttctcactaggacaagactgacagcctaagggaaccataagaagttgccctgatcattcagacattttggtaggtatttgccaaagtcaagaattaggtgccacgacaattcctacataagaagacaaaagaaaaaagttggcagaggagctaatggagttcttaccaaagtagttataaaaacaagttagctatatatacctataaaattaataataattatggacttcaacaatttttaaaaacaaaattaaattttgagaatcatgtctgcctataagtttggtatactctctgaaaacacaaatactagatattctaggtccattgtaaaagacattctatagacactccatacagaatcaattctcccaaatcatcatttcattttgcaagtaaacattgtaataattccaatatatctgtattagtttgaaattaagtaaaaatctcaaaatgataaagaaattgtacaatgaaaagaaaatttcaaattccatgacttttatatcagacataatcttgaactaattacctgttttaatcagcttggttggctatgaggccacaataggagtttgatagaagggcagtctgggaacagcaccaaaaagtaaaaacacacactgaaaagcaaacaatttaacttgaagggcaaactaaaagacaaagtttttgaaatctcctccctgctgcctgtgagcctcttttgatctctccttccataaaaatgagcacgcagcattcttcagatgaaaaaagtttataaaaacacaaccaagtgaacagtaataatacctctttaggaaagcctccttactaatgtactatattgtacaaggcaaatcaagttattcagtaagaaatactaaagagatttcagtatttttatgaccttttttctgtatgtatgaatgccagtgaaagaaaagctttctatttctttaataagcaatttgtaagatatctaggatgttttatgcaaagcagtccaatgatattaaaatgcttttctattatatttttcagggaaaaagatgtggccatgccttggatataattttaggctattagcttcctcaatactagtatcagttctttggaatacatgaaatatcttgactcttctcctaaatttgtttttacttatacatgttattaaactctttaaatatgtcatagaaaataatacaatcatgtaatgagtcttgtcttacaaaattatatgtctcttcaaatatcctatcattgtataatatggaatataataacacagaataaagctagtatcattaaatcaattggataattgcattagtaaatgatgcctctgcaaaatggtagtacccatgaagatatgtatattgtcattggatgtatgatgagtgttgtgattggaactgatgaagtaaaataagtatctagatttga

SEQ ID NO: 119 - DNA, 139078 bp, Homo sapiens
gcaatccagcccgccacgtgtactcgccgccgcctcgggcactgccccaggtcttgctgcagccgggaccgcgctctgcagccgcagacccggtccacacggccaggggctacgacccttgggatctgccctccgctcagctcgagcttccctcgtggccgacggaacaatgaaggtaactacttatggttttgtccgtgttttacaaaaatgtgtgcgtgaatcgaaccggcgatttctccaagaaacatagttggcagggaggggaggaaggcgagacaaccatggcttatatcccccgcaaacgtctcagtatcttctttatcaatcgtagtttgcggggaccgtgcattctgttcagatttcggtttaacctccactcgcaggacgtgccttctcggactttttcacattcgcttttgggaacggaggtgaaagtctgctacagctccctcccctgcttgtgaagtttggaaaggaagtgagggcttctctcagtttctcctatgcacaggaggtggggaattttggagaggaggtctggggatgtcccgggctgtaaatgcgctttcctgcagcgtgtgttcgtgatgcaggagggagcggctggaagagttgacccgggtggagaggggagggagaacgatcttttcactgttaaaagcagaaggcccctcttattttgtttcttgtggaaattaaagcttctaggagttacaaatgatagacgcctaagggcattcatttgttaaaccagtgagcaccctaatggctctgatcttgctaatcaaggataattagcctagctgcctattatttctgactatttaggtgtagggatgtacaccgttgagtgttttgttttcctagtttcacacactggaaaactgcaatcgcatataaaacccgaagagcaactttttccaaggaaagtgaaggatgggcagatattcttgccatctaacattttggaattgagatgaccataatgcaatctgaacttctggtaggaataaagcctcgtttcagagtttctaaggagggagatgaagcgtggttctcaactgctcttatctacaacccatcccagaccatagtttcacttagaagaaataatatgtaaatagcgcctttgttgccaaacaaaaactttcactacaattaaacagtaaccgagtggaaactatgcgtttttgtattcaacagagatcacacaacttttcttctatagttagaggttctatttctggcttcctcatgcttgtttcatttcagatgaaaaacacactttagttgattatagctttagtaagtaaaaggagaaaactaagaatgaacagtcttgcttttccagctttttcctgtccatgtgcagttgtggttaattacgcgtttttgtaggtccaaaaacccctgtcccttccacaagatacttttataacatggggaactaggtaagatatctacaagtagtctcttttctgtttcctgatatttcctaagattaagaaagaaatgattgtattctaggtatgatcgaagaagtatggaaggttccattaagttagttttatcacaatatttcaaacatctttccacttatctcttaaatatgtattgctatcacaagcttgattttttaaaaaaatgttatttgcacatggcatcttgattgcctttgtcctcagcaaattctccgggcttaagtcatgcatgagcttgtattttaagacagacacatgcagaatgggcaacttggataagaaacataggatatacactgagtagcatgtgtacaaaaatggtaagtgagtattatgacttaataaatttagatggggatttaaaaatgatacacatgtaaatgggattggaggcaagggaagtccgtgtgtgtgtgtgtgtgtgtgtgtgtgtgtgtgtgtgtgtgtgtggagggaagacgggaggcctagtggggagagaggttttacattccagacacaggatgtggcccctcaggctaggctcagagatgtaaagctagttaagctggcctaacaaaagggtggtggttagaaaaaggaaaaaaagaggtgggggttggggaggaaaagaatttaatgctggccaatattttcatctgataagtttcagtaatgagtaatttcactggatttcagaactacagagagaaaaggggaaaaatatttttccttttttacgcaagaatttctcttgcttttcagctcattagaaccagatctaattatttgaaatgagtttaaaaccttattatgaaaggaagttgaaaacattcgatcacaattgagttttgtactatggactaaaaccaagatgtgctttctgtcagtagctgtgcaactccctgaaaaaagaaaaatagcgcagagcgatctgagctttgtgaaggctacacaatttatcaggcccagagagataggagtgtgagacttcagtcacgtccccccgtacgcatgcgcaggagtaattatttaaagacattttgttcctgactaactgcctcactcattatgttcctggaatttgtgatacaaaaaaacaatgtttagcctatcaatagtttatatagtttatgttattttaatataaattcttctcaacttagaaactgcctcttttttcttttaaaaacccacttgtaactgctgtatatattcagggcaacttgatttggtgtttcgttggttgcagtcctcaaatttgacctcaatatactctctacttatataaattttgtctcagttttgtccgtaggctgacattccaattgttttcctaattatatattttgttccttatttctcatgtctagaaataaagctagggaagtaaacagctggaaaactgatagtggtgttattaacctaactgagagggctgggcttatgagtaaattattcctgtgcataaatgaaagattgtttctaaatggcagctatgttgagcctttgtattagttacatcttttggggtttcaggttgccagcttctttaaatggcctcttctcaactggtataggaagttggaaaataaagaactttctttatttccctttagtgttggtaaccacagtttctttaaataacagatgcccaccccagggaaacccagtggcatgatcagccttatgctcaggaaggtttggttgctatactggagagtgagaatctgggaccttccatgatagacataattgtgccagctatcctctactttctatatgatgctatcattcttttttcttttcttttttttgacagaatctcactgtgttgttcaggctggagtgccgcagagtgatctctactcactgcaacctctgcctcctaggttcaagcaattcttgtgcctcagcctcctgagaagctgggattaccaccatgcccagctaattttcgtatttttttgtaaagacggagttttgccatgttggccaggctggtctggaactcctggcctcaagcgatctgcccatctcggcctcccaaagtgctgggattacaggcatgtgctatcattctttttgagcacaggaggaaactatggctgatctgctcattttactgtcaaaaatataggcagcttttgtattgtaacattatccccttaacagctgtccaactggtctatacatttcacctaacatatggtaaatgttcctactgttggcctttcctgagcctctgtccattcaactaaggccactgcaatgggattgtatgcagttcagccaagaaataaatgtgaggtgcaactcacattttttaaatgtttcaaaattaagcatttaggtgcttttattcataaacatgactttgcaaatattggtaaacagtttcatcataagaccttgtcagtgactcacaatgtcaatggtgaacgcaaaggagaatctgtcttttctggaacaccaggttcaggtatcagtttcaactatgcttataatttgtgctctaaagtccacaaagctaaattatctttcccctaaaaattgagtactcatatccttaaaatagcttggaaattagattaccttatgaatacagcatagcatgtcacataaacgtttttctactgttatacctttttggtgggaaagactattttgcaaaacatttttcttgtgttcagtaattaatgggaaaaacaaactctaaaagaaagagacagttatgtcccaaaaatacaggaaaatggaagaatggaaacagggaagaccaataaagaaaaaaatagaggaaattacaagtaataaactgaagtcatactgaaaaacatatggctctttcttattgaaagttgtgaaatacttgcaaaactcagctagttccattaagaatagtctttaatctaaaaagaacaaattcatttgtcagttctttatttcggtgtgtagatttgaatgtttcatcaattgcatttacggtttatccctcagtgtgagaactgtttttgctgttttgactataaatggatatctgctttaggaagacttaggaagcctgggacataggattacagatcaaattctatttgactccatagaagttgagacggaaggagcacctgttgggatattctagaccaaacattccacagctgtctcttaacgtgactgacaaagagacacagttgagacgaagtttgggtatatcctgggatgaggccaagggtggatttgcacaggatggtcacagggcagttgttagcattccaccactacataaaagggtgattttgccaagtgcatttcatttcatttcagttgatttagataccaagttatattgttttgactttaggactagatgtgagttcaggaatttgaaatcataataaatgtttccttgaactttgaagataaaaggtagagttaaaagacagctgcgaagtctacatggggaagcataatacatgactcagggttccatggttttcagtgtcggtgagtgctctgtacacttataagaatagtgctggtgtttatagaagaaacacatgcaggtttgaggcaagacttccttgcttaattggtgcttttgctttccattttctaaatgccatgcaaactacttttttttttttcttttgttgagacggagtcttgctctgtcacccaggctggagtacagtggtgcgatctcggctcactgcaagctccgcctcctgggttcacgccattctcctgcctcagcttcctgagtagctgggactacaggcgcccgccaccacgcccggctaattttttgtattttttgtagagacggggtttcaccatgttagccaggaaggtcttgatctcctgacctcgtgatctgcccgcctcggccacccaaggtgctgggattacaggcgtgagccaccgctcccggcctcaaactactttaactgaaaacattcttctaaggaaagcatcagaaaacttactagaattgcttaagaataaataaataatacaaataaaagagcaaaatgagaaagtagacagactcctagtctattgtgctattgatctctccaggttctaggctttcttgggtctgacaccactttgtaaatttttttttttttttttttttttttccagatagggtctcattctgtcacctaggctggagtgcagtggtacaatcatggctcacttcagcttcaacctcctgggctcaagtgatcttcctgcctcagctccctgagtagctgggaccacaggcatgtgccaccacgcccggtgaatttttgtattttttgtagagatggggtttctccatgttgcactggctggtcttgaactcctgggctccagtgatccacccaccttggcctccaaagtgctgggattacaggcatccgtcactgcactgggccagtttgtaaatcttatgaaaagtatggccaatcttttgcaaaatgtgcaaacacatatagacacaaagttttatatctaaattattggttattaaagccaggacaatagagtgcatatagcatggaagacaggtagaaaagactgaaatggtttagttattcagagcagtggagggctattggctcttgcctttgcagtcagctgagatatgaaactatataagcagaagcttcacgctgccatttgaatattgaaaatctccacttttagttcaagagataaacaaccaatggtttgtttgttcacagcacataagttatcactttcttctctgtttcatcccatcaagatctaaggtgtatagttacagaatagaactcggttcataccatatgcaccctaatttcttcgatcttcaactagtttggaagtgtgtgtgggtgttttcttagccaaggttaatatgcaatttcttagtggagtgtaggagtttggggtgcctagccttcctacttcccacttagataacttcccctacctgttgtacctgtcaaaggagaaggccagtatggccatgttctttgcaggtgactccaccttagccacagctgattgtaacaagggtgtatatttggcccaagtccagccatcttttttttttttttttgaggcggagtcttgttctgtcacccacgctggagtgcagtggtgtgattttggctcactgcaacctctgcctcccgggttcaagcaattctcctgcctcagcctcctgagtagctgggattacagacacccacgaccacgcttggctttgtatttttgtatttttagtagagacggggtttctccatgttggccaggctggtctagaactcttgacctcaagtgatccgcccgccttggcctcccaaactactgggattacatgcccagccagccatcttttacttctttcttattctcttattccacatattcaagcaggtaccacgtcctgtggactctgtcttctctgaatctataggttctctctttcccattgccctgcatactggtttatgctctcattacttctcgcttgaattattccaaaagtctcccaactggtctgaagcttaattttcattatgtgctgttcgatgtcattccaccacgcaaaatctatggcttctccattgtctcctgagtttagtttagtgcatgagaccgtttaaaatctacctacacctcttctatgtgcatgcatttctctagtcataagagaggatttgatctatctcaaaatgtgttcttatatttgcatttactggtttttaactccctccatcctatctataatttgcaccatgttgctcaccatgcagcccactccccagacaccttgtgagaacagtgatcatgtttttgcagtggaatgaacatgggcgaaaggtgggaaggtatgcatagatttacattttgaagtcaggaaataagatactgatcaatgctttaattcgactgtgctttttaccttttcctctgttgtagcatgaaccttgccccaaaaagatattgatcatatgctgcaactcctctgcacttaccttttcttctaccatggcaggaaccttgcaccattgttggtgctttacagatattggttgagttaaatcgagagcctatttctggactttcaagattcagattaattgattctgttttatacttctctgtttttgaatggcacatacatctttccacacttggatttctttgaagttaaagctttaattgacttccaaaagacagaggattataaaaacacagagaacagtaaagtatttacacggtcttaatgcctattgccaaacacatatagctgctattaatgcctattgccagactcatatagctgcaaactcatgtagcttaatgcccattgccaaactcatatagctgctatatatgtctactggaaaactcacatagctggttgattttaaattgattgtaggaaaattcatacaaaaagatgctacataggaatataaactgaacaccacaaaaatcgtaatgaacaaactcagtaatgccagcctgttcaatcactagttttcagattaaggcagtatgcaaagggaaacatccttggaatggtcttagaatatagaacaaagtcatgtgtttgggaatcttaaccaattccaatactgttcaacatgtttttctttgttgcaaacaatgcagtttttaagcaaactaatgaatgcataccctgacaaacaaatccaacaaaagaggtacttagagcagtgttcattgaatcctagaattttgaaagaaaaaatctattaggtcattttgggcttttacttctgctgaagaaggattgttcttttgagtttatttttctagctttcagttctattccatttaaatgcctcgagaaataggacttctcaaattccctgtggagagttctggcacctactatattcacttttgaaagtctcctgataactgatttcctttttcttttggttatacacatcaactattcatggttggctctgctgatagttttccatgattctttatgcttatttaaaagaaatcatataacattaatcatataacatataaccattacttggttataaagcatgatattaactaaactggcttttaaaaattcaataacattagagcaaatattttattaatattgtcagtagttccatgaatatatagatgtaggatgtcaataaagtttatgccccttaataactgagtgtgttaatgttgtatttgctggttaactggcaccttccctccttttgatcaatgttcttagaacagtatgtacaggagtactttagtctaccacttgatattcaaggacaacacttcgaagcttgaaatgagggattgttttaaccatattaacgtaactgcatagtttgcaatagatttaatgattcaacatcattgttaatatttagtttaattaaaagtgccttatattaacttgtacacatgtgaaatgacttatcaacaagattatttattgcagcattgtttgtgattacaaagagtggaagtcatttgcatagtcattaggcgtaaaaaataatgacattaaaagaaaacaattgaggaaagaaccagtaagctctcaggtagagataaaaagaaagttaccgtgagccttttcactgtatatatttatatatttgatttttgacacgtgagtttattataatcaagattgaatgaaaaaaattgaagccttttaatgaaattagcttgacaccagagtcattatcaagaaaatctgaaatactggtacctatgcacatttgattttattatttttagttttattattttttgagacagagtcttgctctgtcgcccagactggagtgaagtggtgtgatctcagctcactgcaatctccagcctcccaggttcaagcgattctcctcagcctcccgagtagctgggattacagatgcctgccaccatgcttggctagtttttgtatttttagtagtgacggagttttgccatgctggccaggctgatctcaaactcctgacctcaggtggtccacctgcctcagcctcccaaagtgttgggattacaggcgtgagccactgcacccggccatttaagcaaattttagttaagaccagtaacatatttttgacagtatttccgaagtgttgtatttaatttaactaattgaaaattatctattaagaaagcaagttaaatgtaatgtgtatacttcatagtatacacattataatgattcatagtaaccattatatgaagagtgtctaaacttttcttcaaatctaccatttatatagtacaataatgaccagcaaacaatggctaagttttacttaattagacatttgtgtagctcctaccaaggctaccagactttgtacccagtaacaggaaaacagaaataattcaagcattattctcactcttgagaaacaattctatttagggagatatacataaaaagcaaaggtggctgggtgcagtggctcatgcctgtaatcccagcactttgggaggccaaggcaggcagatcacttgaggccaggagttcgagactagcctgaccaacatggtgaaaccctgtttctactaaacatacaaaaattagctgggtgtggtggcatgcacctgcaatcccagctactgggcaggctgaggcagataattgcttgaacctgggaggtggaggctacagtgagctgagattgcaccactgtactccagcctgggtgacagagcgagactccatctcaatgaataaataaataaataaataaatagcaaaggcaataatgtgcatatagtaggtgctacagtagaagtctgcacaaggttctgtgtatgtggaaaagacaagtcagaaaaattaggaaaggctttattgggaggtgacatttaagcagaatcacgaaagaagacctgatgaacatgggggtaagagcacttgtacacaaccccatactcctgggctcagactcacttgctcattccctaatcatagaagaccttgaggaaaagcatgctggggttcccttccagcccactggtaaatacagagaggcctaagcacccaacatcccccagggaatacaccactgggacttaaagcattggcaacccagcacccagttaaattccccttgtcactgtttccacattgtccccatcaccttcactctcttgatgctctgcattttctctcttaactcgacccacagtagaccctcccactcaaatctgcccccaataacctttgcaaccaatattaccgcactacactttatcttccctaagggtttcctgctcctcctggtcttaggtgaggtcatttctctgccagcctttaaagtggaagctgctcattttctctgtccctcatccagggctggagtgggactgatgcccttcaccctgcccagtactgtttccacatgagactccttgcatagcatctgctctctgctactcagaccaggagtctgtgctctctcttcctctaaccatcattggaagacaccccagtccctctggccccattatccactgtagattttagcacttacctcctctcttccctcccatgtgctgttttcccatttattttaaggtgcatgtggatggcccattccccttcctggcatcttaatccctttaatttctcatttccattaatttgctacattcctcatatgccagctacccctatggccatatcccagacctttgaatcacacaccaaattccatcaagtcctatgagtcatttttggtccaagacctatcttacatctatgcagtcctatctattttaacaaccatgtgcccagtttaggccactgtcttctcttcactgaatatatgtgttcctgttttttctcatccccatttgtttcccagacacaatttgttctccagagcagagtgatcacatcagtcacctgctataaaaactcctcaacccggtggggcatggtgactcacagccccagcactgtaatcccagcactttgggaggctgaggtgggaggatcacttgagcacaggaggagctgaagtgatctgtgatcacgtcactgcactccagcctgggctacagagtgacaccctatctcaaaaacaagcaaacaaacaaacaaacaaaaaccaacaaaaaattttttattaagcaaaaaacctcttcaacctcttcctgttatgttttgaataaaagctaaagtccccaccatgctccagaagttcccaagggatctggtccttctcatctttacagcctcatcttgttttgccgtttccacctccctcatcccccaaactctttttcttcagggcctttgcacttgctgatgcctctgcctggaaggtcttcttctgattccccatccaggggtgccttatcaccctgccctgccaacctcagattggatgctacttcctcaaagagacccttgggactcccatgtttcccaggctttcagtgccctcatctcaacttgtaatgattgtattggggtgattatttgtatgactttgggattgatatctgactcttccactagaccatacatttcttgagagcagagagcatatccagtttttttaccactgtgcaaccatatgtcgtccaatgcttggcccataatagggggttggtgaatgtggtaggctgagtcatagcccccaaggatgcccatagcctcatccccagaagctttcatggtaaaagggattttgcagattgtgattaagttatggatcttgagatggagagattatccttgattatctaaataggtccaatataatcagtagcgtctttataagagagaggcagagggtcaaaagcagaatcagagaaggagatgccacagtggaagcaaaggggtgtgtgtgtatgtgtgtgtgtatgtgtgtgtgtgtgtgtgagagagagagattgagatttaaagagctccattacttgatctgaggataaggatgagccaaagaatgcaggtggcttgtagaagctggagaagccaagaaaacattctcactctagagcctccagaaggaatgcagctctgctgacaccttgatttggaacttccagaaccataagataataattttgtgtagttttgaggctgggctcatgcctgtaattccagcactttgggaggccaaggtgggtggatcacttgaggtcaggagtttgagactagcctggccaacatggtgaaaccctgtatgtactaaatatacaaaaattagccaggtgtggtggtgcacgcctatagacccaactacttgggaagctggggcaggagaatcacttgaacccgggaggtagagattgcagtaagctaagattgtgccactgcactccagcctgggctacagcgtgagacttcgtcagaaaaaaagaataattttgtataatttcaggccacaaagtctgcagtcatctgttacaacagcagtagtacacgaatacagattttggtacctggaaatggtgtgctactgtaacagatacctaaacaatgtggaagtggcttttgaattgggtgttgggcagcatgtggaagaattttgagaagcatgataggaaaagcctagcttgccttagaaagactgttagtagaagtagggatgttaaaggcgctgctggtgaggacttggaagtgaagagcatggtaaagaaaatgtgtttcattttagagaatatcaaagtcattgtagaaggttggcagaagtgtaggttttcataatgtgttgttggtgagggctgagaaagaaatgaggaccatgtttagggaaactggaggaaaaagatccttgtcatacagtggaatgaaactgtggaattgtgtcttacagttatatgggaagcagaatttgtttgaacttggatatttggcttagctttccaagtaaagtattgaaggtgtagcctggttttctcttgctgttttatagtaaaatgcccgagaaaaagggataaattgaggtaggaactgttaagaaaaaggaacaaagacatgatgacttgggaaattctcaggatacctggtttgtaaaagatgctagaattagaagattcattgtcaggaaagtgtgctctggagaggaagccaagggtgagttccttgtggcgtaggttaggggctgtggcagggatgcagggaagagatgatggtgacttggactaggggtctgacggggtatgggaaaatagagaggaatgagttgattctgttgggactttgtattgagttccttgattccataagtggaaacacatgtagagctctctttcctggccacctaagctctctgaccatatccctgactctctccagaatgccttggcttcatgtccacgtgaggacaaatcatatttttctgcattttgcgtgctggattcctctctggactaaagatccaatgagaggtggtttctagctttctgctctttcccacaacactccgtcagtgagtcttctggatgtcctataggcaactcactggatccacttggtctgtggaagaatcactaccacatccatttcaccttgggcacagactagaaggtgaggcagtcatgtcctgcagtcactgggtagcttacaagtgctaatacagcaatagcttaattagagagagagagaagaagaagaatgttatggagcctgtttctagagaggaaaccacaatatcttgatcaagagaccctaaaactggaagaaccagagcagctggtatcaaaatgtggaaaaaactgagatgtggcaagtggtacaactgatagccaaggaggaaaaatttgtatccccctgtaatcccagcactttgggaggctgaaacaggtggatcacctgaggtcaggagttcgagaccagcctggccaatatggtgaaaccctgtctctactaaaaatacaaaaattagctgggcgtggtggtgtgcacctatagtcccagctacttgggaggctgaggcaggaaaattgcttgaacctgggagcagaggttgcagtgagccaagatcgcaccactgcactccagcctgggtgacaagagttaaactctgtctcaaaaaaataaaaagaaaagtttgtaccctcttcttttctcttgcctcaggataactgagattcttataatgcatttattgaacaaatatttgaggagtactcattatgtaagcatcagacactgctcaaggtcttgaggctgtgagggtgtattagtccgttttcacactgctataaagaactacctgagactgggtgatttataaagaaaagaggtttaactgaattacagttcatcatggccagaaaggcctcaggaaacttacaatcatggcagaaggtgaagaggaagcaaggcacatcttacatggtggcaggagacacagtgagaagggagaagtgccacacttttaaaccatcagatcttatgatgatataggagttaagaagaaatcacttaggtagatagtgagggtacgggagtccttggtaaggcttttcttttaaatgaaaagcagccccacacatagacaagcaagctgggagcttgcacgggtgaatgccggcagaaactaggaaccagacacgttaagatggcggctccattttcccttctctgccagccaagtgtacagtaaggagcagacaagctggtgccggccaagaggagaattcatgtgcataataagattagggtggggtgaccagccttcccagtgcgctatgtgaacatcatacctgattgaaccaatctgtgagccctatgtaaatcagacaccacctcctcaagcctgactataaaatctggtgcattcgccacccgccggtgtttcctctcagaagtcccctctctctcattagagagagggctgttttcctttctccttcttctgcctattaacctgtgctcctaaactccctgtgtgtgtctgttctgaattttcccggcatgagaggatgaacctggggtatataccccagaaaacatagccacttaagtgagaactcactcactattcacccccaagatccaatcaccttcgaccaggttcctcccctggcgtgaggggattaaaattccacatgaggtttgagtagggacacagagccaaaccaaaccatatcagagggtgaagagcaggtaaagttgcagctctcctgcaacttgcagggaaaggccatataacacatggttatgagcacaaactgggactggactgcaggtgtgtgagccccagctttgctattgagtgaccaccagcaagttattaaactgtgcctcagtttttttgtttatgaaatggtggtattagtacaacccacctctcatggatgatgtgaggattaaataaaataacatgttgccaggcacagtggtgcacacctgtaatctcggcacattgggaggctgaggcccgagggttacttgaggttagaagcctgagacctgcctggccaacatagcgaaacctcatctctgcttaaaatacaaaaaaaaaaaaaaaaaaaaaaaaaaaaaaaggccaggcgtggtggctcatgcttgtaatcccagcactttgggaggccgaggcgggtggatcacaaggtcaggagtttgagaccagcctggccaatatggtgaatccccgtctctactaaaaatacaaaaattagccaagtgtggtggtgggcacctgtagtcccagctactcgggaggctgaggcaggagaatcacttgaacctgggaggcagaagttgcagtgagccgaggttgcgccactgcactccagcctgggcgacggagcgagactccatctcaaaacaaaacaaaaaaaccaaaaaaattaaccaggcatggtggcacacacctgtaatcccagctactcaggaggctgaggcaggagaatcacttgaacccaggaggtggaggttgcagtgagttaagattgtgccactgcactccagcctgtgcgatagaaggagacagtctgcaacaaagatccaaaaacaaatataaagcacttataacagggtctggtctgaaataagtactatgtaagtactgtaagtattaactaatattattacaatttatcctcatatagtaacatatcaaatattttcagtcagtgatgcaatatgaataaaatgaaatgatgcagtagtgacagaactgagagaaagctggtacaaatttatactgactggtcagggaaagcttcacagaaaaggtgaactttcagctgacacctgagtaccatggtctggaggtaagagtgtcccatgcatatggaacagcaaatgaaacttcccagagcataatctgagaggggagatttcaggagtggagccacatcattgaagttccttagtcctggtaagtgtggattttattctaagtgtggtgaaatgcccctgagaggttttgagtagtagatggaattccatttttaaaagtcactggtgagtcaagtagtgtactatggttacatttttttccccttatacctcattttgtttttcctgcagttaattcttgcattatttccttttatttacttaccttactatatatttattatgaattctttccaattcccaacttcctgacagcctctcaatgtaattttacttaggttaaatgtatctgacagttcattttcttttttgtctctgtactctttctgctaccattctcattcttgcactaatttgtgctggtttctctctgagccagctgcacagctgcctgcctaagacttcctcttggcatcttttaccctctctctgtgttacatccccggttttctgaatcgtgtggcgttctcctttttactttacttcctcatttgtgttgcacgtatgctctagttgtttttagataaagagtgcatcagaggtagatgttttgattccttacatgcctgactttttgttctacttttgctctaggttaatacttgattttgaataatatcctaggttagaaatgatttttcgtcagaattttaagggaattgcttttctgttgtctagtttcctgtgttactgataggaagtccaaaggggctcgtatttcaggtcctttttatgtgtaacctgttttttgttccttgaggtattcagggtctctttttattgctaatttggggagctttatcataacatgggtccttagtcattcatcctagaaaattttcctttcctatatctttgatgatttcgtctcctctgctttccctcttttctcattcttaaacttctatttgtttgacattagacctccttgtttgatcttctaatttaatttttctctcctagtgtccaatttttgaggtgggagaaagatctcatcaatgttatctttcagcctttcccctgaattttaaaattttactcttcatatttcttctgattaatcctttaaaaaaatagcatcctgggccaggtgcagtggctcacacctgtaatcccagcactttggaaggctgagcggggagtggatcacctgaggtcaggagctcaagaccagtctggccaacatgatgaaaccctgtctctactaaaaatacaaaaacttagccaggcgtggtggtgggctcctgtagtcccagctacttgggaggctgagacaggagaatcaccagaacctgggaggtggaggttgtagtgagctgagattgtgtgccattgtactccaacctgggtgacagagcaagactctatctcaaaaaaaaaaaaaaaaaaaaaagggccctgttccactgaggcttcagtgcggagcatggagggatactacctccaaattccaaacacgtttgacacatctaaagaaccttctaaaggatgactaaactaattctgcaagctttagcctctaacttatctccaatttatatttaatagaaggctggaaattgaacagaaaggaaataagattatttggaaataaaaaattgtcagccaagcaaggagagcttggcatttctggaaacttctttaccctggaagaggtaaaaaagtgattctcccattcccccaacagggcattcactaaaaattaagtgagaaatgctttgcctagaggatctgtagcttgcgaacacttgacttgtgccactggtgtacggaacatagcagtgtcagctctgccctgggacagtcaaggctggctggtgctgcctgtggttagagtcaagagaggggtcttcagtgggtgcagtttgcagttccagagtttagtagagcaaagacgtcatgaactatgtgaactctgaggaaaggtgtcatagaaacacctcaaaaggacactgtctaagaaggctacttgctggggcaaggagaccccaggggtcagaggctgtgtagggaataatgccagagctggggttgaaggagaatccttagaggtgagacagaatgtgcatcattgcagtggggctgtgcaaggcagtggtctccacaggaggtgaggacaagggggaggggaggttgtgaagaatccgtaagtgaccatgatgcaatagaaagccagaatttgggcatttgccataggagagggcccccagtgccagattataatggtcacagacaaatgagatttttaaccatttcctctaattcatggtccacacttaaccccgtgggtcctggaaacagcagctggagaatggagaggaaagtgatgtgggagagagaaaactttctttacccttttcataactgagtttatgaagtaaactgacagtagaaagataaataggagaaaagacataaatttattttgtgcgtacacatgggagtcccataaaatatgagactcaaagaaaggccagatgattgaagtttatatagtattcctgagctacagaaaaggaatcagggcttggggcttattgaggggaggtggtgacaggttataagagggtgaggagaggaagtgtatagcaagcataggttgtcttgttatgcagataaaaagtctctcaggtgataaaagttgtctcagagtcccccatcagaagaataggtaatagcctgtgacaaggtctacctgtccaatcttctccctggtgataaaatcttccctggttgatgagattcttatcaaagtttttttctttatagatataaattttgtttacaaaaagacagtttttcagagctactcctgtgtctacagtgtctcagaataactaactggaaatacatcaaataagcatatcctgatgtggcatattctggtcatattttgggatggtgcgtcctgagctccaatgctgaaaaaacaggaaccccatttctgttggatgtgccaacctaaaataatcaaaagggtcagaatctagtttaaagatactttattcaagtgcaaagtttaaggacagtgctagggaaacacggatcccaaagaatggaagtcagcgttctgaactttagaagtttgggattgtttatagagagagagtttagggaagcttaacagaatttcaacatctttctgtgtaaggcttaatgcctagttacaatgatctgattagtcaaggtggtcactttcatttgagaaaggcatatttaacatttcacgggctgggagcggtggttcatgcctgtaatctcagcactttgggaggccgaggcgggcagatcatctgaggtcaggagttcgaggccagcctggccaatatggggaaaccccttctctactaaaaatacaatacaataaaataaaataaaataaaaaaaattagccgggcatggtgcacgtgcctgtaatcccagctacttgggaagctgaggcaggagaattgcttgaacctgggaggcagaggttgtggtgagctgagattgcaccattgcactccagcctgggcaacaagaatgaaactccatctcaaacaacaacaacaacaacaacaacaacaacaacaacaacaacaacaaacatttcacactgaaggtgtaacagtcatgggtttgtattttcgtttttcttggttttttttttttttttttgagactgtctcgctctgtattgcaggctggcatggcacaatcacagctcgctgcagcttcgattttgtgggctcaagtgatcctaccacctcagtctcccgactagctgggaccacagtcatgtgccaccacacccggctaatttattttttatttcttatagagaccagatcccccttttgcccaggctggtctcaaactcctggactcaaacaattctcctgcctcagcctcccaaagtgcctggattacaggcatgggctactgtgctcatcccatggggtcttttgtgccaactggtgtgagttaggtacaggacaataaaggaggcagttaatccattaatccataacaaagatcagtgaagggggaaggtctggtctctggtctctcctagtcatttacagaactagaacgatgagaagagagtgaatctataacctaagaagcagaattgcaaacatgctatgtgactcagtttccagtacttaacttctcccttggcataataaataattttagagagttttaagaattttgttttcttttacagatgttaacaacctcagcttgctgggggctggtggtggtggctgctcagacagtaaagcattgaatgcaatgtgaggtcaaagttttattacagatcataccggtcttttaagtacttgcagcaagattttcctaatacttaaaagtgactggaaactcaataggatcagtgtgatcttctccagatagggatggtagatttttgaaagtgggtgtgaagggcagtaatgagagaaaaataaaactatttctggttgtactctcccaagtcaaggtcattcaatgaatggttatatagatttgcatcaaaagtccctgttttcagcctcacctttggaaacacctggattctctattctgagactttctgagatgagggaaaggtggcttctcatcagtatctccttctttgtgcaatacagtttcagttctttctaatctacagagttagttccttctctactgtcagctttctaccttccaaaatgtgttaatgtcactcattatcatgtttcccattctctttcccttatggtttaaactttaaaagacaatggtatttgtttaagtgaatatctaaaaagatgtggagaaagattcatgtgttcagtctaccatgtttaattggagtcactggtagatttttaaggaaaaataacattctaggtttttccagtattgctatgtagcttgtctatgtagatcaccttgcattcttctgtttctctcttataacttgatttttttcttttcttttcttttctttttttttcgagacagagtctcactttgtcacccaggctggagtacagtggcacaatctcgtctcattgctgcctccatctcctgggttcaagtgattctcccacctcaccttcccaaatagccgggattacagacatcttataacttgatttttactcatttcattatcatccaagagatgaaatttaactcaaagcaaatgactattgtttcaaatacaaatcttaatcagggagaaaagattataacttatagttgaactggggtttggagattatatgtgttttttaaaattattctgtcccacatgtaacatacaagtgaggattttaaaaatttgtctgcagtttttttttttttaattgatcattcttgggtgtttctcgcagagggggatttggcagggtcataggacaatagtggagggaaggtcagcagataaacgagtgaacaaaggtctctggttttcctaggcagaggaccctgcggccttccgcagtgtttgtgtccctgggtacttgagattagggagtggtgatgactcttaaagagcatgctgccttcaagcatctgtttaacaaagcacatcttgcaccgcccttaatccatttaaccctgagtggacacagcacatgtttcagagagcaccgggttgggggtaaggtcatagatcaacagcatcccaaggcagaagaatttttcttagtacagaacaaaatggagtctcctatgtctacttctttctacacagacacagcaacaatctgatttctctatcttttccccacatttcccccttttctattccacaaaaccgccattgtcatcatggcccgttctcaatgagctgttgggtacacctcccagacggggtggcggccgggcagaggggctcctcacttcccagaaggggtggcctggcagaggcacccccaacctccctcccggacggggcggctggccaggcgggggctgcccccaacttcccagacggggtggctgctgggcggaggggctctttacttctcagatggggcggctgccgggtggaggggctcctcacttctcagacggggcggccgggcagaggcgctcctcacctcccagacggggcagcagggcagaggcgctccccacatctcagacgatgggcggccgggcagagacgctcctcacttcctagacgggatggcagccgggaagaggcgctcctcacttcccagactgggcagccaggcagaggggctcctcacatcccagacgatgggcagccaggcagagaagctcctcacttcccagatggggtggcggccgggcagaggctgcaatctcggcactttgggaggccaaggcaggcggctgggaggtggaggttgtagcgagccgagatcacgccactacactccagcttgggcaacattgagcactgagtgaacgagactccgtctgcaatcccggcacctcgggaggccgaggctggcagatcactcccggttaggagctggagaccagcccggccaacacagcgaaaccccgtctccaccaaaaaaatacgaaaaccagtcaggcatggtggcgcgcgcctgcaatcacaggcactcggcaggctgaggcaggacaatcaggcagggaggttgcagtgagcagagatggcagcagtacagtccagcttcggcttggcatcagagggagaccgtggaaagagagggagagggagaccgtggggagagggagagggggagggggagctgcaattttttatttagcaatttccaaacctattgtgttaggcagggttctccagggaaacagaaccaatagggcatatctatatctatatttatatctttatctatatctatatctataatctttctatctatctatcaagagatcgagagagagagatttattttaaggaattggttcatgtgattgtgggagctggcaagtctgaaatccatagggcaagttggtcagctggaaattctggtaagagttgatgttgcagtcgtgagtctgaaatttgcagggcaggtcaggtacagtatctattgcaattgcagtcctgaggccaaattccttcttcaggaaacctccgtcttttttgctgttaaggccttcaactaattggatgaagccctcccacattgagggcaatctgctttactcaaagtctgctgatttaaatggtaatcacatctaaaaaatactttcacagcaacatttgaacttgtgttgtctaagcaattgggcactatagcttagccaagcagacacatgaaattaaccatcactctgtagagatgaaagaactactgtttcaaaaaacaactgtttttgaatccgtcatttatcaacggattcacccaatggttaacctttctatatgctttctctttctcccaagtactgaatcatatgaaaataaattatggttgtgatatttcctatctaaatacttcatatgggacattctcctacatagcacacctaagaagattagtattaattcagagagatcatgtcatatctggttcatatataattttccctagctgacctcaaaatgtgtttgttttgtttacatattactctttatagttatgtttcttttaatacggatcaatatttgtgtgtttttgctgctattttttttaatgacattgttttgaataattcaggctcattggctatttcacatcctgaatttctctaattttatctttatgattagagccaggctctaattcttggcaagaataacactgaagtgaggttgtgtactcctaattgccctgcatcaaagacacatgatatgcattggttcctgcattagtcatgttaagtttgattagctggtgaaggtggtcgccaccatttctcactcttgtaaagggacattttctccttttaaattaatatgtaatttgtggcacaagactttgagactgtgtaaatatcccattctctgacaacctttcttctgatgactttagcattaactgatctaattatatcattcttggcattgagtagcattcttgtgtaaagaaggggttctctttctctccctcctctcattataatttgttactgttattttcttacaagttactaagaattactcaaaggcagtatttttcaataaatcattggtaatttatggtcttctcactctagaaaagggaggatgggtcagaaagctgaggggaaaaaaagggaggaaacgagaatgtatattatcgacataatcggttgaaaatgtctagtgctgtaattatgccatcatgcagattaaaaagccacctgtgaaaaatcaacttgtattgttttgttttgtttgatttttaataaatccttatagtgtatgaataaaaattaaattaattgatcagtatcttcactaatggcagagaaggggatggactgagcagattctgcttttcactctgatatttgttaattgccctgtgtggtctgaagacctgggttctagtaccagctctccctctgcagacaggtgtgttactttggtcaaggcaatcaatcttcttgatactcagtttggttctctctgatttgagcataagaaatatacttgaaggccgggcatggtggcttatgcctgtaattccagcactatgggaagccgaggtgggaggatcgcttgggctcaggagtttgagaccaggctgggcaacatggcaaaacctcaactctacaaaaaacaaacaaaaaattagccaggcatggtggtgcacgcctgtagtcccagctactcaggaggttgaggcaggagaatcctgggaggcagaggttgcagtgatctgagattgtgccactgcactccagcctgggagcctgggtgacagagagagaccctgtctaaaatatatatatacacacacttgaatgcttcatgtcccttgctcagtgacagccccgtcctctgcttctgcacagttgaccaaggcttctcagtctactcctgtgtagaaaagaattaaagcaggcctgaggctgctagtcttagaaaggcttgcaaagttggcccttgtctggtgtctgggaacttgaatttctggagggttctcaccattccctgaaaagaatggctcacgatgcctaaaatatttgtacaaacaatgaagtttctgctgaacatctgcttccttctgggagtctggaattttaggatgtgctaggtaggggtgtttacatgacagccccacataaaaaccttgggcactgagtgtctaatgagattccctagtaagtaatattttacacatattatcacaactcattgctggaggagttaagtgcatcctgtgtgactccactgggagaggactctgggaagcacatgtctgatttcctttgtcccatgtgccttttccttttgctgatttttgccttgtaaatttttttttttttttttgagagacagagtcttactctgttgcccagactggagttcagtggccccatgtcggctcactgcagcctctgcctcctggattcaagcaattctcctgcctcagcctcccgagtagctgggactacaggcgcgcgctgccacaccggctaatttttgtatttttagtagagacggggtttcaccatgttggccaggatggtcttgatctcctgacctcgtgatccgcctgcctcggcctcccaaagtgctggaattataggcctgggccactgtgcctggccataatttttatcctgtaataaattatagtcgaaagtattgagtcctgtgaatcaacttagagaatcaccaaactgcttccaattttctcatatgtaaaatgggttgctataataatgatgatatctaccttatagggttgttttaagtatgaaaaatatggtgaaatatgtgtgaaactaggggccggatgtaggatgagtcatacagtgggtggttattattacggatcatattaactcttcaggtaaaaaccatcttgtagctgggcaaggtggcacatgcctgtagtcccagctacttgggggactgaggcaggtggatcgcttgagcctaggagttcaaggctgtagtacgctatgatcacgtctatcaatagccactggactccagcctggacaatgtaatgagagtctgtctcaaaaaaaaggaacaatcttgtgtttgcgtgtgtgctcatgtctttgttggaataatactgacacagtcactcaaattaactctcaaatctttgattattcatttgatgggaacaacaggtttatgtgccagcttatcaggacccctagttctttcattaaagtgtgtatgtgtgtgtgtatgtgtgtatgtgtgcacatgtgtgctagttttcttatctaacgacgaagtcctttgggaggtttactttttcattactatttttttcatgctttcctttgatgtgcacctggcaatttatagagccaatgtgtactacatattctgctgcagaaaatgacagaggtgaggaaggagcaggaagcagatttagaaaggaatgttacagtttatcaagttgtgactaatggaagctattaaaacaaaaggtaccaacccatcttaaatattcactgcctctacaactatttttctataactgttgttccttgtcagctctggggtggagggaatattcctgaatgttttattaagtaattcaaagatcttcctaggtatgtgtatcaaagatcctatgatgtatctgtcttgtaaattgagactggcatatattgggcttacattactgggaaaaatgtatgtcatcatcattggtgaaaaagagtttccatagcagttttttctaagtagagagataaatgaatcagacttttggaggaggtatgttttaactcactggaggatcacaccaagtctgaacatctaaggaaccctagtggaaaactggttttcctgtatgctgctctagcgatctgaggaaaggcctaaaaaaagccagtgtccctgtgatattgtgaaatacatatatgtggtctttgttcctgtttcctggcatacaagtactaaaaatccttggaatctccaaagtgctgtctttttgtatattagtgttgactgatagcttcagagtggggctggtcaagttgatcaccaatggccagtggtttaatcagtcatgcctatgtaatgaagcctccatgaaaatccaaagggaatggactggggagcttctaagaagtgttttttaccttcccgtgagcctcctgtgctgaacacgtggagggtcacgggaaggtaagcaaaaattcattcacatgctgggagggtggcacatcccaactccacgaggacaaaagctcctgtgctcagaacccttccagacttggaccttgtatctcttcattggcttttatttgtattttaaaaaatatcctgagtgataaactggtagatgtaagtgtcttcctcagttctgtgaaccacgctagcaaattaatcaaaccggaagagggggtcatggcaaccccaacttgaaacctgttggtcagcagttccagagacctgaacttatgactggttggaaggacggggtgctcttgtgggactgagccctcaacttgtggatctgatgctatctctgggtagacagtgttggagctgaattggaggacacctagcttgtgtccactgcagaactgattgcttgcttcctgctggggagaaatccctatatattttggggtccagaagtcttccgtgttgattgtttttgtgtgagagcagaggaaaaatggtttgagagtttttcgggaaacagcccctcttagtatagtggtagaaacactccaaaaataaaatatgctaccccaaaaataaaaaatgaaaataaaaataaaaatctggagtggtcagtttgccaagaggatttatggagcatctaaggtcaagcattacttctcagccctgcagcaggcctctaattaagccatgccacagagtgcggtttgcagagaggtggagttcctgtggattcattcttctctctaaaattataaataacgcagcttccaaacatgccatattacctcacaaggtctaaagactcaatatgaatcttcaacttaacaattataactgacacagattgagatcttcctggatgctgaaataggctttacatgatttatctcatttagttctcataaaactctattattaatattattttacagatagagaaatggaagcacagagagggtaagtgtattagtccatttttatgctgctaataaagacatacccaagacagggtaatttatacagaaaaagaggtttaatggactcacatttccacatggctgggaggcctcacaatcatggcagaaggcaaaaggcacttcttacctggtggtggcaagacagaaaatgagaaccaagcgaaaggggtttccccttataaaaccatcaggtaacatgagacaattattcactaccacagaaactatatgggggaaaccgcccccatgattcagttatcttccattgggtccctcccacaacacgtggagctacaattcaagatgagatttgtgtggagacatagctaacccatatcagtaagtaattagacaaaccttgcaaagctagtaagtggtattgctggaattaaatctgccaatgtcactccagagtctatgtgatttactggtatattatagggtctacctataagcttgataaccttatgttagaacaaataaccatgacatattctgttcagtagtttgcatttccttttgactcctacaggggaggaggccgaggttcagggacattaaagtggggtttagagacattaggtggtttacccaagctttatctactagatactagataattgtctatctgacaataaagctagaacttacacccagctggacaatggagctacagcttaaaacaaaatcttctaatgagctcagaactcatggcttaataagatttgggaaaagtcctgcggacatttcactgtctatccagaaatgcgaggaagttaggagaaaaggcaaagtatctcatagacagataaaggcagttcagtaagtagcctgaataaatagccatatttaaaatctaatttggttcttttgtgcctaacacaattgactttatgctggtatctattttctgctctgtctctctttctgtctctacttatgtgtgtatgcatgtgttataaaatatatcagcccattgatcaatttttaatttaagcaaaaacatggtagattaatatattcaatcaatttattgagtagatatttatcgaggctcacacatttatctgactgtgtactaagcactggaaacccaaagagaatgaagtcactgcctagacagttggaggctgacacataaacaagcagggtaataatcaagtgtcataactagtctattacatgcaatgttaaactagcatctctaccatgcaaaacttgtgctcttggggatacaggaagactttccagagaagtacacaggacaggaatgtgttaggaaaccagtcagttcccaggtcctcgatcaggtcacagtgacttgcgattctattttgaacataggtcttaaatctttattttgatagcaagggttttaaacttttgatatatgatatacttctgaaaatcaaatttcatattctaaaattaagtatttttgcccttaactaacttgaacataatactataatacattaacatatattattaataataaataggacccctggaagtccaagagagacatgaggcttatttggtatgttaaaatcatacaggaagtgttgttaaataagaaatggtgttacactttctttgagttatatttatatggatatgttgttaatatgtgttccaacattgtatgagattcctaaaaatctgatatggacatccagtgtggttgttgggtcctctatgagcctagggagcactggccggttaccttgcatccattcatgtcagcgttggtagtgtcaggcacccgatggttcttagaagagtacttagctctactctgcagtgtctgaagttgctggatatatacctgctgtataaactgctgactagggcgctgcagtttacttactgtcttctcatggggaccttccccttcaactctttcctcttgggtttcacatcttgggtggggagtttcatcctagtagtttgcctgagaatacaggtgaacccacagaacaaagtggacttcgaaagcatctccttggagtgagactttgcttctttctctttgctagcaccatcttgtaccttatcgtcatgaactttgttggctgaatcattcccatttacttaattgaagagtaagagactggaacaatgctcactttgattttcctggataagagttaagagttcttgagatggcagcttgtttgacacatgaattttcttcaaatttgtgcttactaccaactgatttggtgtggaggagagcccagagaagttccctctctctgtcagaacaactttgtaacatttattaacctgacttctgccttcaattaactgtaaccttttgccttccaaattaaaaagttccacattactccaaaaataaaaagtgaaaataaaaataaaaggctgatatgtcatggtatatgcagtaaattgctttattctgatttttttttctaaaagccttttgcaaatcctgaagtgctgtgtattcaaggaaattcatgaaagggaccttgacaagtagtcttaaatacaggtttctgataactttggagatcacacctttggactaggtaaaaacatccaaaactcgtctgggcgcagtggctcacgcctgtaatcccagcactttgggaggccaaggcaggcggatcacgaggtcaggagatcgagaccatcctggctaacacggtgaaaccccatctctactaaaaacacaaaaacaaaattagccgggcgtggtggcgggcgcctgtagttccagctacccggcaggctgaggcggaagaatggcgcgaagcggcaagacggagcttgcagtgagccgagatcgcgccactgcactccagcctcaaaaaaaaaaaaaaaaaaaaaaaaagtccaaagctctaatgaaaaactgatgcattcatgcagattgctaacccaacatcaaggagaacgagaattacatgggactgagtgaatgaaggattgaaattactattttaaagggtttttgtttgaaacattactgattttttttatgttttgttttccagactcaagaaaatattttttttcttttgagctatttatagcttacagcattggggtaaagtatacttctgtgagcaaaatggaaacatttacctttctttctacctgaattcttcagaatttggaaactattcattagtgttcttattttctggcaatatagttatttgcataagttcaataagaacctattttcggctgtgcatggtggctcatgcctgtaatcccagcaccttgggagggcgaggccggtggatcacaaggtcaggagtttgagaacagcctggccaagatggtgaaaccccgtctctactaaaactacaaagattaaccaggcgcggtggcaggcgcctgtaatcccagctactcgggaggctgaggcaggagaatagcttgaaccttgggtggcagaggttgcagtgagccgagatcgcaccactgcgctccagcctaggggacaagagcgagactctatctcaaaacaaacaaacaaaaaaacaaaaagcaaacaaacaaaaaaagagcttattttcttttgtaactggacacatggaaacagtggttattttaccaaggctttgactggaatgtcttttttttgagtgcaaccggactgcttcgagggattgaggttgactttatacagccagtagacttggaaaaagacacacctggtaccttgcccacacaattcctttatagcgtttctaactttgcaataagtaaagaatgtcactttctgacaggcccagggacctcaagatattttggagacgttgaaaagagagcaattcacccaattcatacaggttttacaggcacagtctgatggcgaatctttggcttggcttcattgcttcaagagtttgtttttttgacacggaatctcactctgtcacccattctggagtgcagtggtgagatcttggctcactgaaacctctgcttcctggattcaagtgattctcctgcttcagcctcccgagtagctgggattacaggcatgtgttgctactcccagctaattttttgtatttttggtagagatgaggtttcaccatgttgcccagggtggtcttgaactcctgacctcaggtgatccacccacctcagcctcccaaagtgctgggattacaggcgtgagccactgtgcccagcccttgagaggtttcaaaagtcttaatctgagattccttatgaaaaaattccaacaaagccaacttaagagccatccctgtagaaaatatatctatttaaatatcgtctgttttatgccacaatgtttgttttgcgttgcaagccgttatctcctaggcatgggtaatccactttgagaggaaaatccagacatcattgtgcctaatttgctgccacctgtgtctgtgctggatcttaccagggttagctttattttctttcaactggcaaaattctgataaagcatgtagcttcacggtagagcaaaaagtgtaacttaattgaaagtcatgactttcaggagtctaatgatgctaatatattttcttctagagaggtgtctttattgtatgtaattccctgaagaaatgtaaagatttatctaattcctattgctctgacaggcgtgctcaatagaagcattgaagtaaaataaaaataacctttttaatctgtgtatttctcttgcccaccaagatatttaatttttttcttgatctttgcttttgtttatgtgaagatatttatgtctatatcatttctgtatatatcacagaaaagttttcacttgcttgacattttattctacaatgatttttagtttaagtttaaagaatggctacattcagatttattttcacaactatagtcctgctaaactgcctttgttgaaaactcagtttttataataaataaaaaatatcaaagcaaaaaaaaaagagccttcatgataaatcaccattcttactgcactttaagcagataatcatgccagagactaaactgactttgcaaataaattagttttattattattatctttgtgggtaaaagttgggatgactgtagaagagaaaattatatttcagaagaaaattataccatacttgttattagattctagtcttgataattgtttttttgagtttttgttatttgcctacaatttgggctgaatcctgaattccttcctgggtacaagtctccaaactaatgtttcctaatttttctaccatttttctgtcttggaatcaccaagccctgcaggctttagctagacaacttgatataaactttggaagaaataatgacagcaacttaatatatgagcagtgttcatgtcagctgatgtatggattactcagaaggtttacttgaacacctgattcaaactataatccagaaatatctgtaagattgccactgcaatctgaagctacttcagagactctaggaaaattagtttatagacaactccagatgttaatctttgtttttcttttgttttcatggaaatgccttttattaaacatctgattgcttgattcatagaggcctgactttggtggaagcaacaccactgcctgaaatgagatataactgttaaccgtttaattggagcggcctgttctcacgactgcaagactagttcaatggcttataaaataatccacccgctgggcacagtagttcacacctgtaatctcagcactttgggaggctgaggtgggcaaattgcttgagctcaggagttcgagaccagccagagcaacatggtgaaaccctgtctctaccaaaaatataaaaaattagccgggcatagtagcatgtgcctgtggtcccagctcctcgggaggtggatgtgggaggattgcctgagcctgggaggcagagcttgcagtgagctgagattatgacactgcactctagcctgggcaatacagtgagaccccatctcaaaaaaaaaaaaaaaagataatctaccaacccaatttctcaactggggaatgttgggctcctgctctcctgtctctgacctttcattctcccttgaggctagccatcaagactacaacccctcttccccaaagtgggccatagaaacaaaaccccttttccccaaagccaaccataaaacctaaaaatagtactctaacttccaccacccccagcctgtctgtgtaaggccataaagaaattatctgactcactttgtttgactgaaggttataagacccccattccagagagggtccagcaccacacccagaaggaagaaatgcatgctcagagaggcaagaagggtccagacagacaggctgtgctggatttccctgctcagtctattagcattagaccataccttttttgtccaatcatatttctacgtggctctccatactttgtttaacctaacctaagggggctcagggttttggcctgggcattgtctgttggggaatagagtgagtcatccccagctcatgggtttgcatccagttcttgttgtaaaaggcccaaagcctgttggatggcaaccctgagccatcgtggaaggggggttccagtttcacaaatagatactcagacagccaaactaccatctacttggtgccaacgtttgcactgtggtcaaagacttacctagcacagactgaacaaatcttcccatctgtcacataaatgtccccaagcaatgttgaagcacatgccaggatcggccttgctaggtcctgcttggtagataagcaaatggcttccttgtggtgtttttattctattttgtctcattaacactacaactttgtgttatctacttgataatctgtaattgtaaatacatacaggattatgtaatttgtgtaaatacataatgacagacttctgaaaactggtattttttacttggtgtccatttgaagctgttttaggttctgtggcacatgaaccaatggcatttaaaaagcatactctccttgctcttaaaaaaacaaacaaaacaaaacaaaaactgtccattaaaatttttgtatttttgtaaagacagggtttcaccataaaaatggacagtttcccttatatctttgggtcttcgttctgtaggctctcgtgtcacataaaattatgatcaaataaatttgtatgacttttctcctattaatctgccccttgtcaatgattttgagcaaccttctgaagaaagtgatggggaagtattccctttgctgccacaaggtatatatcagataagtcagtctattttcttgaacatatatcacattcataggaaaaacactttttccaaaagattactgtcttcccaaatacccacgttctccattttttttttttttttttagagatggggtctcactgtgttgtccaggctagtctcaagcttctggactcaagcaatcctctcacctcagcttcccaaagtgctgtgattacagacataagccatcacgcccggccccattttctcctttgggtgtatgtatattgctcattgtcaggcatcaaccatttctcttctctgagatggagtctcactctgtcacccaggctggagtgcagtggcgcaatcttggctcactgcaagctctgcctccctggttcacgccattctcctgcctcagcctcccgagtagctgggactacaggtgcccaccactacgcccggctaatttttttgtatttcttttttggtagagacggggtttcaccgtgttagacaggatggtctcaatctcctgacctcgtgatccgcccgcctcggcctcccaaagtgctgggattacaggtgtgagccactgcgcccagccctcttctaattttttatatttatcatgtatttactagaactggtttattttcgtgagcatatgttgtggattctactataaataatgcacttaataatcattaataaaacttaaatcctttccgtcttgattgtggccttttctttttgctattaatttcctcagcataggttaacctgaactcttaaaagctatttaggtactggtataaaacaaaattttctccaaagcaatccagtatataatatctggattttaaaaaagcagcctcatttaattaggattaatttctcctttcagaagttaagtgattctgtttctgtaaaacgcaaaattataagcttaattgttttccacacaggaaatgaaattcctaatctttttatccagaatcttcatgtgtttgtctctctgtccatctgtcactcctttttaaggtacctggagatgacctagaggcttgccacgcttagggtttcctccctgtgcagaagaagatgggaagtgcaaatgaggacgaggggtggggagggaagagggagtcaggtgattcagcaagtgcaggagcccacagactaagctcaggaatttgcactttgtctgctcgcagagtgagtttcatcgtggtgtgtatatattgagatatgcaacagactccactggaatgtcagaagaacttatgtttatttttcctctaacatgtgggaaagattaaactgtatttgtatttaactcacatagattggcacgtgctcattctgtgtgtcaccctgccacgctgtcacaaacttcgagcagggtcctgaggggagaggagggcatagctcctgctcccagggggttgcctgtgtagccctgcgcattcattctcttccagagggttgtgatttgtggcggtctgtgtgagcctggttaaggagagttacagattatgtcatctggtgttaactgataatctttgcaaaagggacattggctttaagagatgtctgcaaaaaaaactctaaacaaacataaataaaaatttaaaaggataaagccagaataataatgaaaatattagtaatgtaaaacaaggaaatgtgtcatgtttttcatgataactaatattttttcaatttttttttttttttaagacagtctcactctgtcaccaggctggagtcagtagtgcgatcttggctcactgcaacctccacctcccaggttcacacaattctcatgtctcagcctcctgagtagctgggtttacaggcactcgccaccatgcccagctaatttttgtatttttagtaaagacagggttttaccatgttggccaggctggtctcaaactcctgacctcaggtgatcggccgccttggcctcccaaagtgctgggattacaggcgtgtgccactgtgcctggccccagttcttattataagttctccattaaccatatcatgagattaaaaaaacaacaatgatttcatcggaactgacaaatagtgggtgacacaattttgatcatcaagaagactttaaaagaaggatttgtatcactgtcattactgattacttggcccttgtgtatactgggcctttagctagggctggtacaataaaataaccatagttagaaagatattttaaaggattacttatttcatgtttatctcacccttttatccctatttttgggcatgatttattattattaggtttttaaataaataatgaaataagcatgttaggtttgcatgctgctttggttaacattgctatataaccaaccaccccaaactttgtggccttaaaacaataatttatttatttatttatttatttatttatttatttatttatttatttttgagacagagtctcgctatgtcacccaggctggagtgcagcggcatgatctcggctcactgcaacctccacctcctgggttcaagtgatcctcctgcctcagcctcccgtagagctgggattacaggcacccgccatcaagcccagctaatttttcctttatttttagtagagacggggtttcaccatgttggccaggttggtctcgaactcctgatctcaggtgatatgcctgctttggcctcccaaagtgctgggattacaggtgtgagccactgtgcatggccaacaataatttatttttatctctcatggtctctagattgcctgggcccggctgagcagtctgagtcagccttatggtctctcatgtgtttttaatcagtcatgaggggccggcatcatctgaaggcttgactgggctggatgtttaagacagccactcacagggctgacagtgatgctggatgttgcactgttgactaatgagcctgcacgtggctcctccatgtgatttgggctatttatagctggggtgactgggttctaggtggggtagttccaagatccttccaagaggaagaaagcagaaactgcctggccagttagtgtatatgcttagtcttagaacagtgtcacttccatatttctccatagtccattaatcaaagcagttacaggaagcagacagacaggaagggaaaacacaatgcaacagaaggagagattgaagtgttggcagctgcaagccaagaaacacctgggttaccagaagctagaagaagaaaggtaggattctcccctacaggttccaaaggaagctgggcctgtccacacctcacctctggaactatgagacaatcactttctgtgggtttaagctacccagtttgtggcactttgttactaccgtcctaggcaaatgatacagtaactacatacacagtacatagaattgctcattttacttcgttgaatgggacttggcattgaataagcccaaatgagaattcttttgtcaagatttttttatggctcacttttccagagacgtgacatggcaggagtaaggggagggtttggcaggtaggaattatactcatctgtcattgtcttcccaataccaaccaggaagcatgtaaataatagctgtgcagtttgttttctgaaccaaactgggccttattttttttaaagaaactttattaaacaaacaaaaacctagaaacactagatgtatatttttaaggtttctctcacataatatcctaatcatcagtataccgtaatccaagggctacatataactgaaaaataaatgggtcttaaaaaaattaaaacatggtatataacactagctaacatgtactgagcagttactaagtgctaagtactgctaagtcctttatagatatcttcatgttgagtgtcgtcactgcccattacttactctgagtttaaatatgagactcaaaagaggttagtaatttgccaaaagtcatagggcttataagtgatagaaccaggataacgaatctcaaccaagggacttcaatgcccaaaccggtgctcagactgtagccccatgtagttagctatttacatttgaaaaaatttttaatgtttattattttttttaagacagggtcttgctctgtcacctaggctggagtggagtggtgtgatcttggctcactgcaacctccacctcctgggctcaagtgatcctctcatctcagcctcccaagtagctgggaccacaggtgtatggcaccacgcccaactaatttgttgtgttcttggtagaggtgagtttcaccatgttgcccaggctggtcttgaactcctgagctcaagtgacctgcccacttgcctcaccctcctaaagtggggggattacaggtgtgagccaccatgcccggcccagctatttacatttaaatataaattaaaatgaaacaagattaaaaattcggtttctcaatcacactaaccacacttgaagtgctcagtagctacatgtggcttagtggctacctggcagatatagaacgtttccatcagcacagaaagttctactggaaagcattgatccaatctctttgaacagtcacaatgcatataaagtccttattatgactgtacaagggaagacaacgagtagaggaaggcagaaaataggaaaaaaggaagaagaaagatttagggtgagggagagcagttctatgaagaaaagaagctcatatctaggagtggagtggaccctgagaacatgttagtctattatattctaaactttggcagttaaaattccaaagtatattaagtacatgctttctaaaatattagagagctgcagttcaacagatttttaactctccacagcatgtccggcactgggtgaggtgggatggctaggtgaataatataggcattgtcatgtgtgttcgtgtgaagagaccaccaaacaggctttgtgtgagcaataaagctttttaatcacctgggtacaggcgggccgagtctgaaaagagagtcagcaaagggtggtgggattataattagttcttagaggtttgggataggcggtggagtaggaacaattttttgtgggcaggggatggatcttacaaagtacattctcaagggcgaggagaatattacaaagtaccttaagggcagggaaggatattacaaagtaccttctcaagggtggggagggtgtatcatacaaagtgcattcacaagggtggggaaatatcacaaagtacattatcgcaagggcagggagggtgtattgtcacaaagtcaattgatcggttagggtggggcaggaacaaatcacaacagtggaatgtcatcagttaaggcaggaacctgctattttcacttttgttgatcttcagttgcttcaggccatctggatgtatacgtgcaggtcacaggggatatgatggattagcttgggctcagaggcctgacagacatgaacttcccatcataaaattagaagagcattaatcaaatgattagaataaaatattaccattattttgaaatggcaagcattgtatgtaaataaacagcagaggaacccactgtagcctagacagggttcagagacgttcctgccaaggacatggcacagggactgaacaaggaaggatgacagtgcctggcaaaggcagggaatgttacaggtatttgggcacctgtgagaaggcctgatgtccgaaaggactgaaataaattaaatgtgtggggggagagagaaagaaagagcctagcaaaaggtgagctggagagtcagaggcagaaggcagaatctgggatgggctgggagcttgccaatcattttgtcaaatgggtgatgtgaagccttgaaggttttttgaccaagaggagatgtcttcagatttgcgtttgagacattttcactggttgtcatgctaagaatggcttaaagagaagcaaggctggggtcagaggagctgcttggaagctgtttggtactaggatgcggataacatggttggagaaatggcaactgtcagggtatttggagcaagaatggatagacattggtgatcatcacttggatgcatttgagggacaactgctatgtttctactagagcaactacatagagcaggagtaagcaacttacagtccacagaccacatttgctctgtcccgtttttcaaatacagtttaatggaaacagagccatgcccgttctttcacctattctgcatggctgacatcaggcatggttctaagtaatatacataagtttcatatattaatgctcatctatcccagttgacaaacatgaagtgttgctattgtctcattttacagcggagaaaactgacatagagattctctttcgcacccatagcttcagttaccacctctatgccaatgattcaataatacctctaatccagacctcttctctgagcttcagacaggcagatctctcacagccagtcttggagacacttcagaaatcataggtcccaaaccagactcctcctcatcccctcaaacacattctttttcaacattccttttttcttagtgaacatcaccaaatagataagcaagtcagatccaaggaggcctccttggcacttctctcatccttgtcccaccttatatcatctatttttctttttctttttttttgagatggtgtctcactgtgtcacccaggcaagtgcagtggtgtgatcctggcccactgcagcctcaacctcaccaagttcaggtaatcctctcaccttaatcccgtgagtagctgggactacaggcacatgccaccgagcccggctaatttttgtatttttaccagagacagggttttgccatgttgcccaggctgccaccttatctccattcttgctgaaatctggctgtttctctccacttctattaccaaccaccagccaaatctgacttattaaaaggatcatctcgtatgtgggttctgtaatagcttcttcaaaatccattcctctccacccagaccctcttccaatctccaaactgcagccaataccttcaattctgtcaccgctcctgcatactccacctaatccttaacctttcaatggtttctcttgcccctaggttaagctaaattgaaaactgctaaagctacagcttcttagtgtaactagtaagtacagtgactactatgtctggtttacttcagctgttgctgactaatagcacttcttgaatgaagaaattatattaccgtactgtagggaaaaatttgtacttcaatggaaaactgaattatttagagcaaacctttaaggttatctgattctgattccatgggccctttcattgggtcttacattgtttcattgtttttgagttattttacagatgactgatagaaatgcaaaataattattgcatgcagtcatgcaagtaaaatctgaaggtcagggttcaattaacttctctcccctactgtggaagaagccaatttcatttgcatattcatttcaatatttctgacctataaacatgcctgttctttgaaccagtttttatatctgcctggtaacttcattaaatgatttaaataaactctataatttagtttattttatacctgtatgacagtcaggcttttaccttatttttgctttttaaaattattctttagctctccctaaggcactacttggctggccctttggctactcactagcccaagctccatcctcttctgtctaccgcagccccaggctctcttttggccctttgttccagccctcctcagagaagttcttttgtcctggaactcactttcataccaggtgctcttcatcccttcttcctttagtaaatttctttaatctttcagatttctgctcaaggatcacttgctgaaagcctttccaggcctttctgagtcaatacaatccattattagaggctcttagagcacaggcagcacttgttataattttacatctgtctgtgggattccttaacactttctaacacaattaacacttttctctctggctgggggcaatgcatgataacaggatgatggtatgctctcaaccctcccccagcaactagcccagtgcttcgaacatggtggatagatacaccgtttttattttagacagatttttgagtagcaagtacctactgctcaggagacagatggactgaaaaaatatatttgggagtcatcagcacataggtgcagccatgaaaatgcacgagaagcaaaaccattggcaggaacaaaatgaaggctattagagaccttatttaggtggaataattggacagaagcccttaatggggaggaaatagaagcagttaatacagatggaggccgggcgccgtggctcacgcctgtaatcctagcactttgggaggctgagataggtgggtggcttgagtccaggagtttgagagcagcctgggcaacatagcaaaacccggtctctacaaaaaatacaaaaattagcccggcgtggtggcgcaggcctgtagtcccggctactggggaggctgagatgggagaattgcttgaaccggggaggcggatgttgcaattagacgagatcgcgccactgcactccagcctgggcgacagagcgagactccgtctcaaaacaacaaggacaaaacttatcttataagcgaccctggacttccagggacactcgccgctctatggtggtacgtgacctgcctggactctgtggtctttggagcttgggaccccaccccagcgtaagaggcctttctgtgccttgtataaaggagaggaaaagtgtaggttttctgagttgataagattagagctacagtatattatcagtagcgttgtatgaaaccatttaaaaaaccaaaccggatttaaccgctttcacccagaataaactgccctccccctctttccaagatcaagtcagccccagttaccacttcctattaatttaaaaaccaggaaggctcataatttaggctgacgttgccccaggcgaacactgcatataagacaatagctattccaatcctcctttccctttctaaaccgaatagtacttctaacatcacttttccagtcctctttctaaatattgcgatcacgagcctacatcggaaaactatgaaaacagtatgattggagctcttgatggtctgctttgcctgaaaacgatgaaaggcattgagatctttgggcagaaatggcccttagggaatgcgagcctggtagccccataacaccccgagttacaaattcggtttgggtaggtggcgcagggaaatctaaaagctggattcacgttctcccccttcagtttgcacatagcggtcagtggcagacaagagcagacgcacaaatgtcaatccccgcccgcaaactctcgagggcagaaactgctttttgtcagttggatttggagtcggtggaaaagctgccctaatgtagtttctccgaggtttccttagccttgaccgaggggcgcttcccggccattcacctagaggttgtttaataaacaaggatgctcgcgaaatatctgcgcttggaaaggcgctcgttcgtggcgcgcattctcgggcctccgcaagcgaccccggtgacagggacaaccgcttcggttttagcgactgcagacagactgggacgagacggttggaggctcctccccaagggatgctggaggggttgcgtcgtaccctgcgcctggccctggcgcgcggccccaggtcgtggtacccagcgccctatgggccgtgcgccggggcttggccacaccgcctgctttcgcttccagccgcgcgctccgtgccactgccgctctctgcagccccgcgtccccgcagcctccccatggccagcccgcttcgctccgctgcggcccttgcccgccaggtacctcgaacccgggcgtttgcggaaggggggaggattggaacccgggtctcggtagctcgcgggcctggccgggcgccttgtcgccgtttcctgcaccatcctccttcgccttgccctccattccgcctccagcgaggcgtcttcccttccccgcatccctgcccgaaatctggagtcccagcctgcaatctccacctcttcgaggttcccgctgcccaggtctagcaccctcatgggtaacccgctccggagcgtggcgaggaccgccacgggggacgtgagggtagctatggactcgctctgagggaggaggcgggagctgaatctctgggctgccagaacccacagccacatcctacgtgactctgccaccccaaaatattttgaccgcagccttctgcctccttggatctcttccttccccacccccacccccgtagttatttagcagattacgcattaaaacaaatgtctgcaggttttcccaattagtcccgcttccctgtgtctttatcttttaaattgcccactaataccatgaggtttaaggtgtggggtggatgctgcggcatcggaggaccctgctggtggaggaaatggttcacgcccgtccccgttccctttgcaggcttgctattgtgcgtctgtgattgacaagaccacgaggctgagcgcgccctggagatttttctataaatggcttaacaccccagtctagactatttgctcggatataagggagacaattgtttttttgttctttgccggcgaaccctggctctgtagggctgacctggaatttaaccagtcttccctgagccggcggaggaggacaaaaaccgccgcgaccccggcagggtgggaagtgcagggcagcgctcccaagacacgcttgttggaggttcgggcctgggtgcttggttgtctgagcctccttttttgtgtttgcctgggtcctggagaggagcgcacggtatcatggtgagcgtcacgtaggttaccccgggtcccgcttacccacctgcatttacttaatggtggtttaattcttctttaaggattgcagtaacggatgctccgcagagtgtaccggagaaggaggatcaaaagaggtggtggggacttttaaggtaagttgcttgccagaggcttagtgtctaaagcaacgttcaactgaataaatccatttcttgttgagattcggggaaattttcactgtgtgggttacccagttcctaggttgtgttgccagacttttaaaattccactcttagaggaaaaaaagccatttagagagtgacagtacattcatcacaacaaaaattatctagcagctaattgctgattttattttgagtcatatatttttcttgaaaaatagtcaatgcgtaaatattaaactagttgtttatcagattccataatacgtacaaaccttcagtctacttgtagaaaaagttaaactgtgatttttctctttcagtagcacataacactctacagtgaaagtgttgcattttcttcttttctatctgaattgcggggtttatatagtaaatagctcatacttcaaacagtgagaaacaaagcacgttgaaaactgtacaaatacaaatgtaagatgtaatattattttttctataagtctatctcctaccctccctcctcgtggaggttttagcttcttctttttatgcctagtgctgctcttctgcctgtttgagtcactgtcaattgtcatcagacaattgacacagagtgtcctaatgatctcacatcctggcggttcagagagggaaggaaacttgactcatcagtttctcacacattgagctctctcacagtgtgctggagactgtgccatgcattggacatccaaaggtgaattcaagattaggtctctacttgcaaggaatttttattttatttttctttttccttctcttgctgtcatcttagcaaggattttttaaaaagcaaaattagaatattgcaatttcttttctgttttttgagacagggtctcgctctgtcacccaggctggagtgcagtggcacgatctcagctcactgcaatctctgcctcccaggttcaagtgattctcctgcctcagcctcctgagtagctgagattacaggcatgtgccatcacgcccagctaattttgtatttttagtagagatggggttatcaccatgttagccaggctggtctcgaactcctggcctcatgcaatccacctcccaaagtgctgggattgcaggcgtgagccaccaagcctagcctgaagaattctttgcaaagaaaaatatcaactcaaatttaaataatcttttcctttctttttcttttttttgagacagagtcttgttctgttgcccagactgaagtgcagtggcaccatcaattaggtatcactttcagccttgatctctcagactcaagtgatcctcttagcctctcaagtacctgagactatcggcttgcatgccatcaggcccaactaatttcgtcattttttgtagagatgggatctccctgtgttgcccagactgatctccaactcctgggcttgtgcaaccctcccacctcggcctcccaaaatgctgggtcacaggcataagccacaatgcctggccataaataatcttttttatttgttaatttagatttctgtatattaggttttatttaggggaattgcctgtttacactcatgtatttacacatcaaaacatgagttatggtggatgtattcacagcacatatgtaataaggcatgtgtaaaaatgatattgataatttagggaataaaaatggtagattttatagaccatctttgtttttgatatacttttctctgtctcaaaaaacaaaaacaaaaacaaacaaacaaacaaaatatatatatatagcctacattgttgttaactataatcaccctactctgctatgaacagtagactttatcgcttctatctaactgtatgtttgtactcattaaccaacctctcttcctccacctacacccttcccaccccctgccatcttctgatatctatcattctatgagtactctcttcctccatgagatcaacttttttttttagctctcacgtatgagtgagaacatgcaatatttgtttttctgggtttttttttttttctgtgtttggcttatttcgcttaccataatgacttccagttccatccatgttgctacaaatgacacgattttactcttttttaatggctgagtagtattccattgtgtatatgcaccacattttatttgttcattgatggacacttaggtgattccatgtcttgactattgtgaatagtgctgtaataaacatgggactgcagatatccctttgatatactgatttcctttcctttggaaaatacccagtagtaggattgttggtttatatggtcattctacttttagttttttttttggaaagcttcataccattttccacagtagataaactaatttacattcttaccaacagtgtataagcgttctcttttctctgtatcctcatcagcatctgttattttttgtctttctaataataaccattctaactgtggttgcttttgacatatttctctacctttttgttaatctacatcatttataacatttcatatggccttttgggtctctcttgggtagttttcgtatttcttctcccctccccatttatgatgcagtcatattacatgaggatgcagttttgcagcagggcctagcaatgagatacgttgttacacatcctggcgaatctttctgtggactctaggatcctcttcatttgcaagaggtcagccatctatttcttccaattcctccagcttcacatatctccacagaatgcaacactgcaaatctgcagttctcttcatgatcctctttattagattttaaaagagtatctccaaaagatgaacatagtgcctaaggctttccaaatggagtaagaataatgcacaagaacctagaataaagttattaaatgtctgatacagttgtaatacagacttgatttttgaaaaatgtggccaatgaagagaagagcaaatgtgctatacgatggtgagcaaaaggtgttgacaggcctggcatggtgactcacccctgtaatcccagcactttgggaggctgaggtgggtggatcatttgaggtcaggagtttgagactagcctggccaacatggtgaaaccctgtttgtattaaaaatacaaaaattagccaggtgcgatgacacatgcctgtaatcccagctacctgggaggctgaggcttgagacttgcttgaaccggggaggcggaggttgcagcgagccgagattgtgccactgcactccagcctgggcaacagagcaaaaaaaaaaaaaaaaaaaaaaaaaagtgttgactgaaccctggctgaaacagttttcaggtgctttcaacaaatttacacttccctgccctgagcctccctatttcagaacaaatgattacccaactgcaaactttgaattaggaagttgtttttaatatgccctgtttttctcaatatttcttgccatttcacaatcagttattgtggcattccaattcttccacaaacatatgatgtgaaacatcctgacttcgatgtcatcagggaatgtggagcattggaaagagacagattaattatgcagaagaaagtatcatttgacaaaatattatttttatttatctttggaaaggaaatctagaaaaagaaaatactttttaaagaacactgataaaaattgtttataaaatttgtttcctttaggaaacaaatcgttcccttaaaactacatttcatatctgccccaaacgagtcacatgtcttcagctaatattgcttgtttacgtttgaactttattcaattctatcacctagtaatttagtattcttaggtaatttctctttgagctcaggttaaaagttgttatttttagttttcagagttgcagaatttttttttcaagtagagaaaagttcatgatgagattctgaagccacctaatcgtatattactttgaaaaactggatatatgccgggcgcggtagctcacacctgtaatcccagcactttcagaggccgaggtgggtgggtcacctgaggtcaggagttcgagaccagcctggtcaacatggtgaaaccccatctctaccaaaaatacaaaacttagccgggtgttgtggcacatgcctgtagtcccagctactcaggaggctgaagcaggagaatcacttgaacctgggaggcggaggttgcagtgagcccagatcacatcactgctcttccgcctgggtgacagagtgagactccatctaaaagaaaaagcaaaacaaaacaaaactggatacagggcagtgcttaggtacaaatcagaaagttagaggttgctattcatatcattaagaaataatgtgtcttacgaaagaatgtagcagtttactgaaatagaagtcatacctagaaatgtaataatttatctttaattgtcagaaatttaactgatattatgaagttctaattataagaacacttatttgaggttaaaaattaccttattctatccctgctttgccgctaatttgatctctctggattagtgggttattgtgggtcctatgggtattttaaggagaggtctcagaaaactaaaaattatatatactggatcataatcattcttgtcacccactctcatctttctgtttttgttttgtgttttactacccttccccttttactaagtagtcttagtagaagaaaatttgcattaagtttgtcgtactgtattgatatggctccaaatgtttcttagcccagggtcctccccattcactgataaaagctaactaaggtaaatcacaggtgtttattgtgcaagaatactgtgaaactattcatgtaataaaaagtttgtgttagaatttcactctctttaaatcctggacatcttctgtgagtgtatctgaaagcagccagacatcttcagtatttaagaaaccctttactattctgtgtgctaggcactgtgttagctttggaattcaactgtgaatactctagccagacttcttgtctaaatagtccagaataggggttgctaaactttctttctttttttttgagatggagttccactcttattgcccaggctggagtgcactggtgtgtctctgctgactgcaacctctgcctcccaggttcaagcagttctcctgcctcagcctcccaagtagctgggattacaggcgcccaccactacactcagttaatttttgtatttttagtagagacagggttgtgctgtttgccaggttgatctcaaactcctgacctttggtgatccacccgcctcggcctcccaaagtgttgggattcagggtgtgccactgtgcccggcctgctaaactttcttaaatggctagatgataaatattttaggcttgagggccatcaggtttctgttacaactagttggctgtgctgccactgaagatacaagaatggcgtgactatgttccaataacattttaatttcaaaacaggccagctggctgcatttggtctgcaagtaaagtctgcctgaccccctacctagtccagaggacaacgggagagaaaagggattcaaagataaaaataatttagctggaatatatttctttaaataaacttattatacttagtaaaaagtcttaaattaacgtttttacttgaattaaatagtggtaaaacaggctgggcacagtggctcatgcctgtaatcttagaactttgggaggtcgaggcaggcagattgcttaagcccaggagttcgagaccagcctgggcaacatagtgagtccctatctctaaaaaaaatacaaaataataataataatggtagaacaaagtcaattttttattgaaacttggcattttattggcatattacaaagtagcattactagactagcctgaacattacagtaatattctgtccttaatgccttttgtgtcactgtaatatgagctttctgtttgttttggaatatgttttcagcctgaatattattctaaaaatacaatttactatcattcataatatatcaaatgactcacgtagctgcaaggcagtgaattaaacagaattagatcattttaaaaataatgataagagctgatgatgtaaagtgaaggtctgtatttaatttgggagggaaaagactttttttgtatattcaaagagatggagtttgacatcccttcacaacctgttacaggttgaacttgcccctgtttttttaactgatcaaaaagttccttctcttgtgtttctttttttcttctcttttctcttcttttcttttcttttttttttttctgagacagagtcttgctctgtctcccaggctggagtgcagtggtgcgatcttgactctctgcaacctccgcctcccgggttcaagtgattttcctgcctcagcctcctgagtagctgcgactacaggtgcatgccaccacgcctggctaatttttagtatttttagtagagacggggtttcaccatgttagctaggatggtctcaatctccaaaccttgtgatctgcatgcctcggcttcccaaagtgctggtctcctgtgtttttgtcagcattccacagatgctataaagttagtggtggtatcgcatgcaatttgtacgcttaatgtttggccatttgcagtgggcaaactggctatgtcgggagctggtgagatgctgcttgtggggagttgtttcctattactctgatttatctttgtttaaataagagttcctttgttcactgtttcctccacacagaacagaggatttatatcttagtgttcattctcaactttcctgttttcaaagaggaaaacatttgcttcactttgctcatttcttctccagtgcacccagaggattttgaaggcttatgccaacaattctttggggcagttggagtgtaaccattgctaaatagcagttcagtacttaatgacattcattttagtttaacaaatcattgtgagtgttgccattttttattagggaaaacatctctttcatctttcccaaatactcaacatgagtcctatggtgagagtgaaaaagggttgtattctttttttgcatcatcttaccccatctgctattttgtccctcttctatatatcactgaaatttggttctgatattctattaggcagtgtacattgcagagattatgaataactggccgaattctgaatgcaggcatgatttgttcagctcagagtgttaaatttctgtgttagctgctaacctttaaaagtcaattgatttcctttttttttttcccctctgtataatctagccagcgaatgctcagtagcttttctgtaaatagtgatgatttttcttccccaggctaaagacctaatagtcacaccagctaccattttaaaggaaaaaccagaccccaataatctggtttttggaactgtgttcacggatcatatgctgacggtggagtggtcctcagagtttggatgggagaaacctcatatcaagcctcttcagaacctgtcattgcaccctggctcatcagctttgcactatgcagtggaagtaagtacatgggaattaaagagagtgacatgcttgcacttcactgtgggtactaagtagcttctcctgctaaaatagctcttgggcagtatgggctttatcatatttaccagaggaagccgaaaatgtctttaaaagttttcctatagacagttggattgaagataaatcttagcagctaatttttcagataatcttgcattttctgtgacgtcaataaaaaaattatttaaagcaaatagaaaggacagctggtgggaaaattggcaattaaaaagccagcactgttgataatttaataagtcacctttcttcttagatcttctaataattgagaaagggtcattgagaacaatattatgatttgattttaatgctaactccacatttttatgaccagtaataatgtctagttatgcatgttaagggacatgtaattaaatgtcctccttcagccatgagttgaaataattttaagcataaaatgtttaaagaattctttctctggtccttttcagggtgcacaattaaccagatgcacagtatacttcccattgtcttgattctcattgtattttacttttgaatgatttggacatctttcccagaataataggggtgctggaaataataatagtcttcctattaagtgctaaaatatggtaatagtaaaatattaatagattaatgataaaataacaacttttgtttactgaattcctgcaatacgttctgtattatgttccatatatgaatcatctcatttaattaccttaagtgagaaggcatgtgattaagcattcaggctttgaagtcagacatcctgggctcaaattcggtctcatttgctccataggaacctttatgacttgaggaatttaatcatttgtgctttaatttctttatctataaaattggggtagttataatatctatcttacagtgatctcataagtataaaataaagtaatttatctaagcatatagagtcatatctggtgcatagcgagagcccagttgttagcaataataattaactcttgaagcagtggtctcatccattataaaaggaggctcagaagagttgtttcttgactaatattacacagcagtaagggtggagctaaggttccaatgagaagcttctttctgttatatagcccctacatgtatacaccaaaattactaggatgcttttgcaattaactccttcaaaattataaattcatataattttggaaagatattcactgtccatatgtatccacaaaatgttgaatttaggaatctaagtttctgttcccagctcttcctgttatgtcaatttgaatgagttctttcattatttgccacaagccctcaccatgtcataaggtataataaagaacaggtgaaatgaagtgcttttatttatttatttttcagacagattcttgctctgtcacccaggctggagtgcagtggcacgatcgtggctcactgcagcctcaaactcctgggctcaagcaaacctcgtacctcagcctcctgagtagctgggaccacagacacatgtcaccatgtctggctaatttttacatattttgttgagactgggttttgccatgttgcccaggctggtctcaaactcctgggctcaagcaatcctcttgccttggcttcttcaagtgctgggatgacagccatgagccactgctcctggctatgtgcttttaaatttgaaaggaataatatgcccaagcccaggtcactggttctcaaacttaatgtgcatcagaatcagctggctacatctccagagtttctcatttctaacaagtgtccagatcatgttaattttgtcgctccagggaccacattttgggaattgctggcctatgggaagtaaatgagaaatgatttaatgtcatttttggaagttaaaaaagattttggtggtcactggtttttgaaaactctttgaaggctgggtggggtggttcacatctgtaatttcagcagtttcggggagatggggttcttgggaaatgagccctccacccatgggatctgatgctatttccacgtagataatgtcagagtcgttcaaaccagagtgactccatcctgaataggggctgggtaaaataaggctgagacctactgggctgcaacatgatgagaccctgactctattgaaacaaaacaaaacaaaacaaaacaaaacaaaacaaaaaacggccaggcgaggtggctcacgcctgtaataccagcactttgggaggccaaggcgggcggatcacgaggtcaggagatcgagaccatcctggctaacatggtgaaaccccatctctactaaaaatagaaaaaaaaaaaaaaattagccgggcgtggtggcaggcgcctgtagtccaagctacttaggaggctgaggcaggaaaatgacgtgaacccaggaggcggagtttgcagtgagccgagatcacgccgctgcactccacactgggtgacagagcaagactccatctcaaaaaaaaaaaacaaaaacctctttggccatctatttagatgagttggaatgctactttgattggttttgccaatttagatttttgtaattagggtagtttaaaaaaactctcaaattactgttatcctttgttaaaaaccaaaatcttttattattagtcttctgcttacaatataagtaaaataaatgttttgtattaataactggattgtatattgcatggttaccactatgtaacaaaattaatagcttaaaattacaagcgtcattttaaaattatttttcatgtttctggggttgactaggatggctaagtggtttttgcttggggtccgtcacacggttgctgtcagtggctggggttagagtcagctcacaggcttcctaactcatatggtgctggagggagtgtctcttagcatgctaatgcttcataatttgtgtataatgaacagtgaggatgaccagaggtcactttcattgccatctgggctgcaaaactcaaggagttgaaggctcttccggcattacttgttctccatgtggtctcctcaggatggcagtcacagagtaggcagccttcttatgtgctgacctagggcccaaaatctgtatgtgtcagttgactgagcccagatggaagctctattgctgtttacgccctagcctcaaaactactctttcaagaaaaattctccaaccgagtttttcctctactctcacaccaccacaacaatagtcaacataggagacttctatgatcaaaggtgtagggatttctccccaccaccaagcagtgaaccccagctgggtgtcctccaattcaattctcacactgttattacgggaaaggtgtcccaatccagtccccaagaggttcttggatgttgcacaagaaagaatttggggagagtccacaaagtaaaataaaatttattaagaaagtaaaggaaaaaaagaatggctactccgtagacagaggagctccgagggctgctggttggctattttaatggttatttcttgatcatttgctaaagaaggggtagattattcataaattttccagaaaagggatgggcaattcctggaactgagggttcctcccctttttagaccttgtaggttaacttcccaccattgccatggcctctgtaaattgtcgtgacactggtaggagtgtctgttagcatgctaatgcattataattagcttataatgagcagcgaggacggccagacatccctttcattgccatatgggatttggcaggttttggctggcttctttaccacatcttgttttatcagtggggtctttgtaacctgtatgttgtgccgacctcctatctcatcctgtgacctagaatactaacctcctgagaatgcagcccagtaggtttcagccttattttacccagcccctaatcaggatggagtcgctctggtccaaacacctctgacattatccacctggaaatagtgtcagatcccatgggttaagggctcattccccaagaccctaaccaccctcacctggcccagacacaagtcacaagtcctgtcctctggaatgtctgactgagaggcatcaagttggagttcccatgaccccctcttctggtttgattaatttactggagcagctcacaaaactcagggaaacacttaggtttagtggtttattataaaggatactgcaaagtgtatagatgaagcgatgtgtagggtgaggtatcgggggatagagtgcagggcttccatgccctcccggggtgtgccaccctttaggaaccttcatgtgttctgctatccggaagctcactgaactcattcttttgggtttttatggaagcttcacgtcaatattccttcccctggggtatgaggcaggaccttcaccggagagggtcttttattttatttcattatttttaaaatataagatggggtcttgctatgtagcctagggtggtattgaattcctgggcccaagtaagcctcccgcctctgcctccgaaagtgctgggactacaggcatgagccacccagcccctttggagaggatcttaagactcacagttagaaaggagggcaggagaaggtcagagagattctgcttcctgcccctgaggcctaacacacccagcattataacaaaagactgtaacaagggctatgggagttaccagccaggaactgtaaatcacacagtattatttctgccttactcttatcagtcatgatggttacaaaggcctgtccaagttcaaaaggaggaaaaaagcactccacttcttgatgaggaaggtcagggttctggaagagcatgggggactggaaatattgttcggccatttcatggaaaatacagtctgtaatagacatcagtgataaatggggagatatggtggatgtattgttttcctctgagtgccaaattgggttctaagatttcacaggccagatattattgaagtggctacgttgtctggggtatataccttggggttcgtcattttgtgccaggaaaatttaggacaaggactcacacgaggagtttaggagtggaggtttaataggcagaagagaaacagaaacagttctttctgtagggagagagggatcttcgagggaaaagaccatccagcagcagatgagctggattttatagtcaggtttgaggaggaagtgtctgatttacttagggctaacaggttggtttgatcaggtatgacgtttacatagcacaccgggaagtctggttgccccaccctaatccttttatgcaaatggactttcctagttgattggagctatcttgtctgctccttactgtacaggtggctgacaaagagaagggaagatggagccgccatcttgaacatgattgacgcagctgtggatatctatgtctgcagcttgattttacaggctgctcttctttagaaaggggctgcttttcattaaaacaaaaaccttactgaggactcttgtaccctcactatctgcaggtgatttcttaactcctgtatcattattatagtgtcataggaatctaggaagtgtgattgccttctggagagaacttcagggtccctggattttctcactaatcatattcatttcattccctgtttacctgtttaataaatgttgagtggctactatgtgcccagggctgtgcaaggtgcctggaataggatggcaagcaaaccaaccatgaccttgctctcaaagaattgttttctttctttcttttttttctgagacaaggtcttgctctgtcgcccaggctggagtgcagtggcctgatctcagctcactgcaacttccacctcctggcttcaacagattctcctccctcagcctcccaggtagctgggattataggtgcccaccaccatgcccggctaatttttgtatttttagtagagacagggtttcatcatgttggccaggctagtctcaaactcctgacctcaagtgatccgcctgcctcagtgccgagattacaggcatgagccactgcacctggcctgttttctgtcttttttttttaacccccacatggaaagttaggcagggatttaatttcaaagagtttcttcccaaatattgtggtgaaacatctagtccatttatgtttcaggctttttcatagatattactgtttctcttagactgacagacttaggacatcacatgattgaatgtcaacctgacttttaagttcaataatagtttcattttttaaatgcaaaattaaataggagtaatatccttgaacatgtttctccttcactcatcggacctattgagtctagaatccattttattttgagagctccaactacatgtggtttctgttaatatctgaaagtaatttttaatatctgaaagtttcaaatagtgataatatttgaaggtttcaaatagtggaggagagacgcaaactgcgagtagggaacgcggattgaaggaaatgaaaagttgataataggcacttcattttcagattataacaaatatttagtgaaataaagcataattttaaaaaatggataagacatgtatgtactatttaatgtgtactaataaatgaatgctcatatttgccatccagataaagaaatagaacagttgaacatcacagaagccctcgcgtgtcccattcagatcacaaactctatctttctactggtaaccattattcttacttttgtgataacctttctttgctttcctttatggagtgtgtagattcttaacactatagttttgcctctttttgaacttcatgtaaatgaaaaaatgtatatattttgtgtttgtgtgcatgtgtgtgtgtgtgcttgcacacgtgtgaataccccttattgtttgagcttagtattatgtaagatctaaccaggaaggaccaacctaacatttgtggggcctgggacctaagtatagacagagatgacatggtccactccatatctgttcccatcccagttctgccctgtgctacaaggggtcttccagacactgcataggtacccataccacctgcaggcagatgacctttgcctgtcctttggagttaggcctgggtaccctactagtggtgtctgctcttgggatgataaacccgaggggcttatcagctttatatatatatatatatatatatatatatattttttttttttttttttttagctagcatctctctcgttcttccaggctggagagcagtggtgtgatcttggctcactgtaatctccacctcctgggttcaagcgattctcctgcctcagcctcccaagtagctgagattacaggcacgtgccactatgcctggctaatttttgtatttttagtagagactgggtttcaccatgttggcatgtgagccactatgcccggcctcttttttttttttttttaagagacagggtcttactatgttgcccaggctggtgttgaactcctggcctcaatagatcctctgtccttggtctcccaaagtgctggctcagtcattatgttctttactgccatccattgcagtataaaaagaataacagttttccctcagaatattcttggtgaaacagtaacaattattaattttattaaatcttggctcttgagcaaatgtcattttaatattctgtgtgataaaatagcaatgtcacataaagtgcttttacatacttaagtactatggttgtctgaagaaaaaggagttgtgtgattgtcttgagtttgtaagtggaactacttttttcatcgagcaccgtttttacttgaaataacaaagtatgaatatgaatgcagatttggccatttggcagatttttatttatttatttgagacaaggtcttgctgtgtcacccagactggggtgcagctcactgcagcctttacctcctgggctcaagtgatcctcctgcctcagcctccttagttgctgggaccacaggtgtgcagcaccatgctcagctaatttttaaattttttgtggagacaaggtctgaccatgttgcccaggctggtctcgaactcctgggctccagcaatcctctcgcttcagcttctcaaagtgctggaattacaggcgtgagccacggttcccagctcgccttttcatatgtttattgggttgctaaatatgttcttatttgaagtgcccacttgttcaagttttttgttcacttttttattgctgtctttataattttttgatgacaagaaatatgtttaaattaaaggcagttttgtcaatctgccttatgtttggaatttgttgtgtctttaaagactcttttcctgcccttatattataaagatatcttatagtattgatattgtcattcacagttaggtctttaatcctagaagttgatttttgtatgaagtaagggcccaatttatttttttccacctatgtatacccagttttcccagcaccatttaaacgggcggtactttcccctctgatatgtcatgatgacacctttgtcatgtacacatgagtttgcttctggatctctatttgtgttcagttgttttacttgtctgcataaatgccacagtcttggtttctcagtcattataatgagccttgcctgctaggaagggtccttctactttgttctccaagagtgccttggatattcttggtcattttctttccatataatttttagatttggtttatcaagtcgataaacttttgtcatgcagttttttaaaagaaaataaagtgccctaatgtgattttttttaatttggattacattgaatacataaatcagtttggggaaaatcaacatctttataatattgaggctttttatccatgagcatgaaattgctttctacattaataacttggtaaagttttatattttccttatggatctttcacttcttttgttagatttttctccacctaagtactgtatcttttaattctactgtaaatagtgtttttattttttaactgctgctattacataggaatataattttgcatctggccagcttgcctaaacagatgatttcaaaatattatctgtcagattttctgtgttctctatctctgtaatcatatcatctatgttttatgatctatgacagttatattttttcatctccaagctgatattttaaatttcattattcttgctttatactggttgtacatattcagttagagtgattgcagtaggcaatttgcgatgttcccaatttgataaggaaagcttttacattttaccattaagtataacgtttgcgagcttattatagctatcctttgtcacttagggaagttatctttgttttttagttatctaggaaactaaaaaatcagaaaagttagtttgattttatcagatacatctgctacatctaatgagatgatcatatagtttttttcctcccataaactgtgaatataatgaatcacattaattgatttttttaaatgttaaaccaatctccatttctgggataaattcaacttagtcatgttgtattagccttttgtatatcttatatctataatactgaatgagattatcatactctttacatgtatttgaagccatgtcattaagtgcatacaatttttattaaatttttaattgacaaataattgtatttatttatggggtacgatgtagtgttttgatatatgtttacattgtagagtgactaaatcaagctaattagcatactcatcactgaacatatttatcatttcttgtggtgagaacatttgaaatttaatctcttagcaattttgaaatatatgatacattattattaactacagtcaccatgctgtgcgataggtctcaaaaacttattcctcctaattgaaattttgttccctttgaccaacatcttccaattccccaacccctagcctcctctggtaaccaccattctactctctacttccattagtttgactttttcagtccacatatgagtgaaatcgtgcagtatttgtctttctgtacttgtcttgtttcacttagcataatgtccaacgggttccccatgtcattgtaaatgatggaattttcttttttatagctaaataacattccatcatgtatacataccacattttctttatcgattcatctgttgatggacagttaggttgcttctgtatcctggctattgtgaataatgctacaataaacatgagagcacagatacctcatgctgatttcaattcctttggataagggtccccaaaccccaggctatggaacagcagtggtatgtgtggcctgttaggtactggatcgcactgtaggaggtgagcagctgcgagtgagcattaccacctgagctccatctcatctcagatcagtggcagcattaggttctcataggagtgtgaaccctattgtgaactgtgcattgcaggaatctaggtggtgcactttttatgagaatctaatgcttgatgatctgaggtagaatgattgcactctgcaagactccccacgctcatccctgtggaaaaattatcttccacaaaactggtccctggtgccaaaaaggttggggactgctgcttttggatatatacccagaagtgggattgctgaagcatatggtagtttaattttaattttaatttaatttagtttaattaatttatttttagcacctaggctggaatgcagcagtgcaatcatagctcactgcagcttccaattcctgacctcaagccatcctcccaactcagcctcccaaatttctggaactacaggaatgagccatctcactcagccctatttttagtgttgggaagaatctcaaaaagtaatgactgtactaatttacaccgctaccctcagtatacaagggttccatatcctcactaatacttatcttttatctttttgatagtagccattctaagtatgtatagttttaaaattatgaagtttaaattgaaccttaggaagttgctactctgtcaccaggctggagtgcagcagcgtgatcttggttcaccacaatctccgcctcctgggtttaagcaattctcctggctcagcctcccaagtagctgggactacaggcacatgctaccatgcctggctcatttttatatttttggtagagatgggtttcaccatgttgtccaggctggtctcgaactcctgacctcaagtgatccaacagccttggcctcccaacgtgttgggattacagacgtgagccatcacacccagccttgaagttgccttttttatcttcagtagtgcttcttggcttaaattcttttgttttataaatagtaatggaagcttgccagttttattttagaaagtatttgcaggccaggtgcagtggctcatgcctgtaatcccagcactttgggaggccgaggcaggcacatcacttgagcccaggagttcgagaccagcctaggcaacatggcaaaacctcgtctctacaaaaaatacaaaaaattaacttgggcgtggtggtgcgcgcctgtagtcccagctactctggaggctgaggtgggaggattgcttgaacccagggggtagaggttgcagtgagccaagatcttgccactgaacttcattcagcctgggtgacagagaaaaacaactctgtctcaaaaaaaaaaaataaataataaaaaataaagtatttgcatgatatatctttttctgtctttttgattcagatattgtcagctgagtccaatctaacaaacttatattttaaccgaagctttagtactgttatatttaataaactaataatatatttgcacttaaatacaacatctaattttatgctttttaattatacatgatttgtatttctttttttcccatgtaagtttttagggtatacatctttaaaggccttacttttcattatcgttcagtttaacttattttctaatttccatttttcttctgtgacctatggtttagttagtggtggatttattttccaaaatatggatggtgtccagtcaaacttttggtattgatttctggcttatcttgtgtttggaaaatatgtgaattctacagctggtctgtgtaagagttctctgtatcagttagggaagtttgttcttcctgttgttcatatcttgcatatctttactaaggtttagcctgtttgttctataaattacttagagaagctgtgttaaattttcccactaaaattattgatttttgtctttctctgtatttatcagtatgtatctactgaagtcttttcaaatccctgatcagtggtttgttcaggacagcactttgattgagggaggtgacgtggcttaacatagtatggtcttgagctgcctggtttctgtgatttagggactgaaccagctctggtcacatctggattatctactatccagcattcaaatgaaccagattacatgaaaggatatgggggtactctttgggggccacggtgccacaaggcctttggtttcgatctccattgcctagggaattaacctgtgctgtgtgattctagatgttttcttcctgctcccttaaataacacctaaatgtgttattcagcagtgtggctcctgctaagcagaggagaactcggaattcctaccaaattctgataataaaataactttcctccacctcaaccattgtttttaccagtcctgtcaactgttagctttcctggatttaatgatctcaagttgaggtcaatgtcaacagctttatgggatgaataagatgaacgcccataggaaagtcagtctcttgaacacgggttgttttcttttggttaccctctaagattttttctctttgatctccagttatttgaaggattgaaggcatttcgaggagtagataataaaattcgactgtttcagccaaacctcaacatggatagaatgtatcgctctgctgtgagggcaactctgccggtatgtaagtgtaggagtttcttttgtgtttcttttaatgtaacgggtcacggtgttgaccaccaaataaataatttctgaatagttagataaatattcagtacaaaccatatgaacattaacattatttctgatctactttagttaggtaaaaatacaagaaaatggccgggcacggtggttcactcctataatcccagcactctgggagactgaggtgggtggatcacttgaaaccaggaattggagacaagcctggccaacatggtgaaacaccatctctgcaaaaaatacaaaaattagccgggtttggtggcacatgcctgtggtcccatcggtgtggctgaggcatgagaattgcttgaacctggcaggtggaggctgcagtgagccaagataatcacatcactgccctccagcctaagccgcaaagtgagactctgtaaaaaaaaaaaacaaaaaacaaaaaacccaagaaaataatatcatttggcaattccacaattttttaaaatcagtgtctgtgggggattcatatgcaagtgagagatgaaagagtaaggaagaaaaatgtatctcaacctaaaataatatttgaagaccacatgaaattaatattgaaaatggaaaatatggtgtgcagcacaggtattttgcggatattttgcctaattgctttagatgctagcaagatatagtaacttaattattttgatattttatcttaagtaatgttttgagataaaaagatatcaaaatggtttctcatggccattgaatcgtggctgtcacaatgtttcttatggagcagaaatcattgtaagatgggttagattttttttttgagagagagtctcactctgtcacccaagctatagtgcagtggcacaatcttggctcactacaacctccacctccggggttcaagtgattcttgtgcctcagcctccttagtatctgggattacaagtgcacgcagccatgcccagcttaatttttttaaaaattatttttagtggagacatgatttcaccatgttagccaggctggacttgaacttctggcctcaagtgatctgcctgcctcagcctcccaaagttctgggattacaggcatgagccaccgtgcccagcttcagggatttagcccaacctatgcattcaggaagcctgaggacggctaaatccaagtgttcttcattcctctgcctatttttgtaacccgcatttcacccatctcctttggaggccataatatagtagcagaggggaaattaaggtaaattctttggactagggcatagtttcgctcttcttctcattacagctagatcactggggaaaagtctttaaaatggggctggaaggaaagggaagtaatatttgttagacatcaattttgctaccaaactgtgttatgtagtttcacattccttatctgtgtaatcacagcagtaaggcgttgctaagaagattatttgttgtacagtttattagtgcctttgtacagagaagaaaacttgagtccagagagattaaatgacttgtctgaagtcacaaagagcaaaaggacagggcaagaaattagatccaggtgtttttattcctggtcaagttctcttctcactgaattctgtctctagacagcaataccaggggctgaggcaggtgctacagggttcacctatatgattggcagtcccaatttctataacattactacattattattgctgttacaggtcaatatttaaatagacaaattctgacttcatgagctttactcagatgcttatgactgactcatttctaccttaggtgacccatcacatctctgaaagtatgtttctctactttgcaagtgagcagagactaaattattttatgaagtatcacccatctagtagatgtaatttttttttctttagaaataaagtgctctttgcttttgcccattttcctattgggttatctatctcttcattgactttggggatatccaaatatatataccagttaaaattctttgttgatcatgctaccaataacttcacccagtttgttgctttacatcttttgaagaacggaagtctttaagtttcaaatagtcacattttatccatttttttccttcatgatttgtgttttacatctcctacttaagaatcctttcctaccttaaggtcacagagatattttgtactttttaaataaagtcttagtattttgtcacatttaagtatatcatctaattagaattgattggggggtatggtaagatgtagggatctaatcttatctttcacatgtggatagctcgtcatcccatcacaatttttggggggaaaatcagaaaaaattgtttggttttattattactttaaaattttttttattggtaccataaattatacatatttatgaggtacactgatgttttcatgcatgcatataatgtgtaatgattaggacaaataagaaagaaataaataaaaattaggataattaggatatccatcacctcaaacatttcttatttttttgtgttgggattattaattttttaacagtttaaatgcttcagtgaggatcatttattattgccacattgtgagaaaattctgtcatttattatgtttttcattctttcaggtatttgacaaagaagagctcttagagtgtattcaacagcttgtgaaattggatcaagaatgggtcccatattcaacatctgctagtctgtatattcgtcctacattcattggaactgaggtgcaaactgactctttattttggggtactttgctgggcaagttattattgtttattgttgtttgaaacttctagcatatagtttgcagtagccccccagtagcatcattaatgacttcttccttctgattgtcaagattagaggtagcaaacattttctgtgaagcgccaatcagtaaatattttttggctttgtggccatatagtttctaataagaaattagatccctacctcttaccataccccaaaatcaattataattcgattatatacttaaatgtgacaaaatactaagacgtttattaagaaatacaaaatatctctgtgaccttaggtaggaaatgattttttttttttgaggtctctctctggttttttttttttgcccacgttgtcgcttaggctggggtgcagtgatgcaatcacggctgactgcagctttgacctcctgggctcaagtgatcctcctgcctcagcttcccaagtagctagtactacaggcatgtgctaccatgcctagctaatttttaaattttttgtagagatgatgtctcactctgttgtcctggctggtctcaaactcctggcctctagcaatcctcccaccttggcctcccaaagtcctgggattacaggcatgagccacttcacctgaccggagaggattcttaaactctgccattttagtactaaagcagccatagacagcacataaatgagtaaatgcagtgctgtttgccttgcccaattaagactagtcattattttctaagtttacaagtgcagtgcctcccattgtggcagtacttctctgaggtagaaatggttttaaaatttaggggagggagagctgctaattttcattttcatgaggtcttgggattacttggcatggagtgagaatggaggttccccttcccacatagaaaaatggtgaaaataaagttcacagtgggagttaaggaaggaaattgaagagctgggatggtaggtttaaataacatgaccttatgatttcctggtgggtcacagtctcttggttgggtgcccttgtgaataaaggcatggattgggcatgcctggaggggccaaggccttttgagcggacgagtatgtttatatgaagaccctgtcacctgtctctggtatctgctaggcagctgtggcttgagagtgtgatattgagggataattgatggaaggagattgaatgtggctggcaggtaaagagatagggaacatatggagatatttagaataagagagtgtgagatagagcgcttttgctatagcctagccattctgttctctactaagtgttgcggggttaccaggttttctactaggctgtatgaatgcaaaaggtagagagatatatagggccatggaataaataccgaagtgttttctttggtatccttgatacctttcgaaagccgtgtaaggatctagataatgaatttcgtgaattgcagtctctctgacaagttttaaagaataggaacaattttaaaaagtcatctacttccataagttttttgacattttaagataattgaatttttttttttcagcttttaagttccagggtacatgtgcaggtaggtgtgttatataggtaaatgtaagccatggtggtttgctgtacaaatcaacccatcacctaggtattaagcccagcatccattagctattcttcctgatgctcttcctcctcccgccccttccgacagaccctagtatgtgctgctccctgcatgtgcccatgtgttctcattgttcagctcccacttataagagaacatgcagtgtttggttttcttttaatattatttttaactttatgataggaaggagtactttttaaagttggttgaaacattgttactgatctcaaagcactaccttccagttattctgagatactttttcagtctaagatctgatactcctattcctggtttgttgagagtttttgtcatgaatggatgttggattttgtcaattgctttttttgaatctcttgacatgattatgtggttttgtactttattacattattaatgaatgaattatatcaatttatttttggatgttaaatcaaccttattttcctaagctaaatcctacttggtcattgtgaataatccatttttttatcttgctatattcagtttgctaatattttaagaatttttgtttcactgttcatgaaatatattgatctagttttcatttttcttttctttcttttttttttttttttttacatctccctcctcttcctcttgatctagttttctaatacagctgcactccaacttacgatggtcctacttaggagtttttgactgtatgatgtttgaaaacaatatgagtttagtagaaacttactttgagtacacataccattctgtttttttgcttttagtacagtattcaataaattatgtgagataaccaatactttattataaaataatacacttttagatgattctgccctaccataggctaatgtaattgttctgagcacatttaagataggataagctaagatacgatggatgtttggtaggttaggtatattaaatgcattttcaccttaaggatattttcaacttaggatgagtttattgagttgtaaccccatcacaagttgaggaacatctatgtatctaattccatgattcagtaaattctttagactgccaaaatcctgtaatctagagttagacaagatcttaaatcaggttttgtggtccatcttgtagtcatgatcattctcactattagggaattcttaactttttgcatttgaatcaccgaggtgttatttaaaatacacatatggaatccaagctccagagactctgagtagatctggtgagtgattgtgatgcctgcccacattcaagaaccttagtacaaaagccctgctgaatggttctctttcactatacactctatcaacttatgtacttgatcacactttggacctcaaaatcaataatttttaaaaatctacttcctaagttgtgaggtacgaattgaaggaaataatgaatactatttggggagtcaacattatttattaacgaataccatttggggagccgacattatttatatttggttggtatatttgtatcaactatcattttctaattaatggtataggcagaataaaccatcacttgtgattcagaaaggaacatgatacaaataacatccaataatgtatatggatttaaatagatctgccccctacagatgttacgcaattcatgttggtaatgatcattcattaggttttcgtggtggctacatttgatatgtgaagtactggctggaagactggtgccagtagcttcaggtttgctgggattctttcatcagagatgactagctttacttatctttttatgttgcatgtttctatgatgggcctatcctgtcattgtcttcatagtataattgcaagctcaactctgtcagttatgtgattttttttttttttttggtcctgtcttgcttttggctgacttctatatgtttttatttcatgtccttttcatagttagattaactgggtcttatgtccaagagatattttgatttctttgaatgaataaatctatgttaggctactgtattaggttttatagacacctagttgatcacttgtgtccagtctctattccctggtatggtagttgctgtgtttatagaacattgaggattctacaatggacacattggtgttgggccccagcccagacccaaatcgaaatttctagagccaggatcagagactctgcattcaacaaactctccagagatttcataaccacttttaaaggactcaccatcccaaaccttgttaaggaatgaaatatatgtctgccagtaatttcagtgctttaagtcattgaaagctgaacttttaatggcaccaaagtggaaatatttatataattgaaagctaaacttcatcctaatggcagtgttgagttcacttccataggccctgatataacagtctaatattattgtttttcacataaaataagattcagtcactgccatataattagggagtggctctgctattggatggacttaaaatatttcattatgtttgccaagctctgtctctttacatgttttataattaactgatccttcatttttattttgttttattttatttttgagatagagtctcgcttggttgcccaggctggagtgcaatggtgcaatcttggctcattgcaacctctgcttcccaggttcaagtgattctcctgcctcagcctcctgattagcggggactacaggtgcgtgccaccatgcccagctaatttttgtacttttagtagagacggggtttcaccatgttggccaggctggtcccaaactcctgacctcaggtgttctgcccacctcggcctcccaaagtgctggattacaggcatgagccaccatgcccggcctccttcatttttaataatcttcatagatacatacttgttgtactaatgtttttgtgcagttcctcatgataaataattaaatcaattactaaaatccttatagatttatgatgataataaatggaagtgtgtattattgaaacatgtttaattaactgttcatatataaccagtgagtagggattggcaattaaaaataccaggctaccagtgcatggaaatttgaagaaaacaacaacctgaaattcagaatactccaaaatctgaaactttttgagcactgacatgactaaaaatgctcattggagcatttcagatttcattttttcagattagggatgctgaattggtaagcataatgcagattaatccaaaatctgaaaaaaatcctaaatcaaaaacagttttggtcagaagctttgtggataagggatagtccaagctttttggactgaagctttttggataaggtatagcctataatacataaatacataatacaggataatcactgacctgaatgtatagcatcagtatggtacacaaatatttaaatccatgtactttgttggatattatgttatataaacttcttgtaaaaagtttagagagtaaaatcattcacattaccaaaagatttctcatatttataaaaaggattatagcagcattttaatcagtatctcctaaagtatttatttatgggttgttaaatctaaaagagaaactacagtctggagggctctaaactactgctgattacatatcagttgggaattaagagaaaatctcagatcataatatttaaataaaaacatttacatgaatgatttctaagttttcactttactagacaagaaactaaaattatatgactgtcatgttcaatattggatacttaacaacactacatccaaggaagccaggttttgctgattttaacctcgtcctgttgagtaactccatgcaggtacagtggtacaaacacatgtggacacacagacccagacctttatttcctcggggattctggtaagtgtagaggtgtcttgaccatagtcaatagcagaaatatgcacaaccacaagctctgaaattccatttgattgttgctcttagccttccactttttaggcatatgtcagtcccatttcatcccacccactctctccatttgggaggtggtagagtgagacaatactgaactataccagggctgagaataagtgtctttgaaaagggtcgaatctgtgatgctagagacagccctggaaactgtcaggagttagcccaaccaggactgtgaccagatcccaggctgtccaccacagatttgcaggctacctgcagatgtgactttttcaaatgtactcaaagacaagctgactttggctaatgcagaaattaattaattcctctttttcagtaaactttatcctcctacacttagattgtctgtaagtacatctctggagttgagctcaactagaaagaagctgtctgcatttagttaataccagcattggatgcacacaatataatttgaataatgtagagcaacattttaatcatctctcataagcagtttccccatttgcaacttcctgggaaatcttacattatgaaatgttcattagaactcccattttaaaaccctgctgccattttgtgagtgggcagaagaaaggctggagatgagatttgtctgtctcaaatgattcactccttcatttctggttcactccacagggagcttaaggacatgtgcgtttcatagacatgcctttcttttccttttatcaccttgttaaatcttaagattgaacatacaattcagcctgtaatcatatcaattcccatgaaaaatattttccttattcactgcctctatttgtgcttatacatctgatcatctttttcctttactttacaattagtttctatgaacagaagaatctgaaagatttaaagactagttagcacagcagcaatttataaatcattaatttgggtactgtctatacatttaatgtgttctttttcatagtcctatgtgaaatacatatacatatatatatattccactgtttataaacaatattcagttttatttgcataactcaatatattttatattaacagctccgtttttagtgtcttaagacatcgagtctgtttttagagatacagtctatttgccttgattttagcctgttataatcagcttattattatctggccactcttaccagtgagtatcatcttgaggctgttcttgctcatttcaacttgtcacaggggatgttttttactctttggagtttaggtacaccaggttattaattatgctcctgattcatggtacttccatcatggggcatataaggtccctgtctttgttttattcccttctatcttcattcaccactctcatttcctctctctccactagaaataattctcaggaatcaaattaatattattctggcttatatgtgtttttaaaaatctcatcgctttttatacatgtaattttaatttatgtaagagactttgtcctacagatttcattgtgtttcttctctttttcgcccagcactgtgtgttccatttctatccagtctactatgtgtacatcaagtccatcatttctaactgttgcatagttcatgatgcgaggcatcttccacattgtatcccaattccctaactggaatcccagttccctgctacctcacacaatgctccagtgaacagctggaaaatcatacaacccaaggaattattgaaagtgattatatcccagcaaaaggcccaggcccatcttacacttccaccccaagaaggtactgctacttttcgggaatggcctggtctccttggcgaaattggcatttgatctgttctcatcactgtcgtctggcatcagaagtgaccccacttgtcaggcactgtactcagtgctttccatgcactaactctgataacaatcttttttttttctttttttgagacagagtcttgctctgttgcccaggctggagtgcagttgtgtgatctcagctcactgcaacctccacctcccaaattcaagcgattctcctgcctcagcctccccagtagctgggactacaggcgtgcaccactacacctggctaatttttgtatttttagtagagatggggtttcaccatgttggccaggctggtcttgaaatcctgacctcaggtgatccacttgacctcccaaagtgctggaattgcaggcaagagccactgagcttggcctgataacaatcttgtgagcaggtgcttatgcagtattttagggatgtgaaagtaaggtccaaagcggtgaaataagagcctgtattctcttaacctccatcccgcaacatcttttatgtgtcagtccctgcactaagtctagggatactgtgctgagcaaaaactatcttcttgctttcacagagctcagtgtctggcagggggtcagactttcataatataaacccactaaatgagtgcatattgatggcggtcactgctgtgaagaagtgggaatggttagcatggaaacatagccccaatgggggcgactaagttctttcccatctcattctactatgtctactttcatctctacttttttcttttctgagctatcagctttcttgctctcaactatatttgatgtatttaaccagattttatatattgtattatgtattttataacatgtatatatatcatataacatacacatatacatacatacacacagccaattaagtctcaagttcaattacaatgcttctaagtttaggactattcattttcattttggcagagaaattatctggtaaaaaattcaagtagaaccaaaggtatacaatagatgggaagtttccttttcactctcacactctcatttccatccagggttctacaattcatctccttccaagcaattcctattgccagcttttcttataccctttcagaaatacacacacacacacacacacatatatacacacacacacacacacccttacatgtgtttgtacattatctctctttttacaaaattggcagtgattctttgtcctgtttctgccactactcaaaaattttaaaacaaattacacacctataaacatacaatttaaagaaaagagtgaaagtgaaaatctaaggacccagcacatggttaagatgagagcatgatgggttcaatggaaagcctttgtgtacctttctcctttgcctccgttccctctccaatagagtcaaccacgttggaggttatagcacttccttctttatgtccccccatctcccatctggtatggtattctcttttactgcagatggacattttggcagacatatgtagttgcttctctttggtatttacctaggagttgaagtgctgggtcacagggtgtatgtatatttcactttagtagatactgctgttgtaggactttctccttagtttagctaaagatggggtccttgtcccaaggccatgaaaaattaggctcgcagacaatttgaaaggtgagaataatggaacttattgggaaaaaagggaaacagggactccccacaaagccagggtcctgctagcatgcttcctgccttgcagattgaatcccaggtaccacccaggaagaggaggggccaggctcctccccactgtgaatggtgtgaccgtctgtggctccccagtgtgcactcctcccagtgtgcaggccggttggagtttctctggggtcttcttcccacttggctgtctcactgccaaactcccaaagtgcttataccagtttactctcccatcagtggtgtatgtatttgcttcatttctttgccaatactgatactgtcttattaactttcctcattctaatgtatacagtcttgtgttatttgtggtttaatttccctgagaaccaattatgttgagtaccttttcataggtttaccagctacagaagtcctcttgtgaagtgcctttgcaagtcttttgtctttttaattttttgcatctttgtatattctaggtataaatcctttgatacatatatcacaaataacttcctagtctatggcaaatcctatgttggataaacgtactgcaaatagtttcccagtctgtggctagcttctgtgtctgtgtcttgctttgtcactttcttactgatatcttttgatgaacagaagtacttagttttaaagtagttaaagttttctttatgttttatactttttatgcattttaaagaaattttttgttactccaaggtcatacaggttaaataaattcttactccaagaacattcttttaaagttttgctttttttcatttaaatgaaatccatatgaaagtgaactttgttatcaagtaacatatacaatttcttttatttttctgcacggagaccaagttgtcccatcaccatttattgagtggtctatcctttcctcactgattacagtgccagttttgatatgtcatgtttccatagatgaagaatattttggggctctctatctgtaccttcctttttaaaaaatataaatagtggtgatactatgaacaattttgtttgtattattgttttttgcacttaaaatttgtcttggagatcttttcattttggcacatacggatacacccctatttttttttccattttcctagatgtggggtatccattggacatatgtaccgtactgaatttaatatagaatgtcataaattacaagatgtaacattattttatacactgagatggagaatcaaactgcaacgcagtacttccctgatcatcctgagtgattcatgagttagttatactagcctcttatttctttgaggtgtacgttttctgagggaatctgccatttctcctgccatgagttgcattgcttggctcgtgataggcatttttatttttgcatgtaattttgtaacaaatgctaacactgctttatcttctttttgtttttgtttattgagacggagtcttgctctgtttcccaggctggagtgcagtggtgcaatctcggctcactgcaacctctgtctcccaggttcaagcgattctcctgcctcagcctcctgagtagctgggattacaggcatgtgccaccatgctcggctactttttgtattttttgtagagatggggtttcaccatgttggtcaggcttgtcttgaactcctgacctcaggtgatctgccccactcagcctcccaaagtgctgggattacaggtgtgagccaccagccagctttatctttttaaaggtttcttcctattgtgggtttcattagagggcttggttgttgctttgcaagaaaacattgacttgcttttgtttaatagtcttataaatatttgtttcactaacatcaaatacatgccatgctcctgcttttgagcttttctgtgcagtaacttttcttctcagtgctaaatcataagtttttaaagacatttaacatggcacactcaacatgtgtcaccaatgcccatagccactggaagtatcatcagtgtcaacagctatgacgtttggcaatgacagctttgccataactgctgcttagccaataacaattgtggaatgctgagtccagatctcaaacatgttaaaggtaaaaaaaaaaaaaaaaaaaagatattttcgagtctgtaaaacatggtagcgtatccggaattggtgggttcttggtctcactgacttcaagaatgaagccatggaccctcgcggtaagtgttacagttcttaaaggtgtcgtgtctggagtttgttccttctgatgttcagatgtgttcggagtttcttccttctggtaggttcgtggtctcgttggctcaggagtgaagctgcggacctttgcggtgagtgttgcagctcttaaggcggcatgtctggagttgttcgttccttgcggtgggttcgtggtctcgctggcttcaggagtgaagctgcagaccttcccagtgagtgttacagctcataaaggcagtgtggacccaaagagtgagcagcagcaagatttactgcaaagagcgagagaacaaagcttccacagtatggaaggggaccccagcaggttgccactgctggctcaggcagcctgcttttattctcttatctggccccacccacatcctgctgattggtccattttacagagagctgattggtctgttttgtcagggtgctgattggtgcatttacaatccctgagctagacacaaaagttctccacctccccactggattagctagataaagagtgttgattgatgtatttacaaaccctgagctagacacagagtgctgactggtgcatttacaaaccttgagctagatacagagcgccgattggtgtatttacaatctcttagccagacgtaaagattctccaagtccccactagactcaggagcccagctggcttcacccagtgtatcttgcaccagggctgcaggtggagctgcctgccagtcccgcgccgtgcacccgcactcctcagccctcgggctgttgatgggaccaggcactgtggagtgggggtggcactcgtcagggagactcaggccgcacaggatcccacagcggtggcggggggcgggaggctcaggcatggcaggctgcaggtcccgagccctgccctgcagggaggcagctaaggcctggcgagaaatctggcccggcgagaaatctagcgcggcgccggtgggccagcactgctgggggacccggtgcaccctccgcagctgctggcctgggtgctaagcccctcactgcccggggctggcagggccagccggtcgctccgaatgtggggcctgccaagcccactcccacccggaactccagctggcccacaagcaccatgcgcagcccgggttcccgcccatgcctctccctccacacctccctgcaaactgagggagccagctccggccttggccagcccagagaatggctcccacagtgcagcggcaggctgaagggctcctcaagcgcggtcagaatgggcgccgaggccgaggaggcaccgagagcgagtgagggctgggagggctgccagcactgtcatctctcagtagcataatttatataaccagtctcttgttgattaaccattatattattgatacaacaaatataagaactgttactagtaaattgagtaaagcaggaaaattaaatttggtctcttactgatcaaccattattagattgttgataacaacggttataatgttgatcaaccgttatattgttgatacaattatatttgatgtatttaaccagattttatatattatattctatattttataacatgtatatgtatcatataacatacacatatacatacacacacacagccaatataatttcactctcagtttcttgttaatcaactattatattgttgatacaacaaatataagaactgttactagtaaattgaataaagcaggaaaattacatttgggagccttaaagatgtaggttttcttcaagaaatttatgttatagttatatcccctgttgcatgtgaagacatacattcaaggatacttactgcagctcacacaatttgctgataggttggatgtgggtgtgagagaagagatgctgttttccttttgggcgatggcaactggatagtaatcagttactaagatggagaagaatgagaaagaagtctttttttgtttgtttgttggagtgatatgggtagaataaagagttaaaacagtcatgcatgtaggtactatagatgtgaaagtctattattcaggggagagtttggaatttaagggatagattcttgtctttaagcataaaaatgcctttgaaggtgagaaactagattacatctttaaggggagaactgtagatagagatgaaaagaaggcaaggactaacccctggggcaggtcagcatttagaagaaagggagtttgtaaaatgctaagctgtctgagaagtagcagcctgcaaggtagaaagaaaaacaagagaggtttagtggactggaaaccaagtgaacctggaaaccacaagcagctgtggcaaatcctgccacagtgagatgaggcctgagaactgagtattggatttgtcaatgtggaaggccttggtgatcttgataagcatgtgttagtagggtggtggggttgcagtgtttgggatttgagagagaatgagagaatgggtagctgtgatgctgaatatgtata[450 bp omitted]gcctagtcaactgagccaaactggatataaccacaaggtcaaaggcaggagccagtgaggagatcttggttttgaggtcattcctggtgcgataataaccatcctgtagcattttcttgtcacttagagaaggcattagcaaactttttttgtaatggtcttaatagtaaatatttttgactttgtaggctatatagctactcacctctgcttttatagtacaaaagcagccatagacaattcataaataaatgaacatgttccaataaaagcaataaaaacaggcagcagtctgaagtttgtcgactcctgatttggaatcattccagaaagtgaaataaaagcatggcttcttttttttttttgagacaaggtcctgctctgtcacccaggctggagtacagtggtgtcatcatagctcactacagctttgacctgctgggctcaagtaatcctcccacctcagcctcctgagtgtctaggattacaggcatgtgacatcacacctggctgatttttaaattttttgtattgatggggtcttgctatgttgccaaggctcacctcaaactcctggtctcaagtgattctcctgccccaggattcccaaagtgctggaattaaaggtgggggccactgtgcccagccaaagcatggcctttctaagggtgactcactgtagcacctcctgagtactttcctatcaagtatcctggaccactttttaaataattcattctaaaatccatatttaggattgattccaaatttgccaacctgtatttcccaaataactggcatgataattcttgtctttttcccaaatgctcattttccactcttcaaacgttgagtgttgactgaagttctgtggtcatgtttacagtcatttttatgctctttgtattgtacatatggaatgtatttaccatttctgttagcaatgatttcttgcaaaaacaataacacttgctagttttgcgtgcttaaaaatatcgagccctggcgctctctacatattatctaatgtaatccttatattaaccctgtgagtagtcattatcacttcttttacacaggaggaagttagagaagagtgttaagtgttcttttagtcttttccactttgtctttagttttctcttagctgttcttttaaattctaaggtcattcttatctaaaaacttaaaagagttgatcagcctttttatcaagtgttaaatttataccatcttttttctttgaacagggctggcaaataaacctggatttatcccttagccctgttacagcaagtctcagaaaatttggacttcagcttccccagtgatacattttcaaatgcctatgtatggattgcccattagtttattggctagaactaaaggaaatcaggcaagagacaaaggacattttctctagggtgtcagtcaatgcaaaatgttaggactagcatcagatttttttttttttacaaatgaaaataattgaagtgtggtagaagttcctctagttctggcagtcctaaatattgttaactgaagaatgatggggctcataaatttggaaaggagagagaggggaaaagagaacgggaatttatgctgagcagggtggctaagtatatatattcaacaggctataggaggagctattagtattcacgaaggggtggcacacacatacatagtaggctaacgtgtatgcagcatgcatcacaagtcactttggggtggagccttaacatttaatgtattacagttagggcctatacatcaaaaggtgaagcagaggacacgaaagccctctgtgttcagcctctgtagactggccagaaccactctgtggtcagaggtctcttatcaggaaagaattcttgttgttgtgttgaaactgcaaaagggaggggcagtgtcaggcaggtggttgataccagtctttcagaagcactggtttctgtttaacttttagagaagaaagcttaattggagtgttactggaaagggataccagtctagaccacaagagaggattcttggatctcacacaagaaagaattcagggtgagtccacagagtaagatcaaatcaagtttattagagaagtagagaaagaaaagaatggctgctccataagcagagcagcactgaaggcttctggttggctatttttatggttatttcttgattatatgctaagcaaggggtggattattcatgaattttcctggaaaggggtggggaattcccagaactgagggtttctctttcttttagaccatatagggtaagttctggatgttgccatggcatttgtaaactgccatggcactggtgggaatgtcttttagcatgctaatgcattataaatagcctaagataagctgtgaggatgaccagaggtcaatttcctcaccatcttagttttggctggcttctttactgcttcctgttttttcagtgggttctttgtgacctgtatctgtcttgtaatgtcctatctcatcctgtaactaagaatgcctgacctcttaggaatggagcacaggtggtctcagctcattttatctatcccctattcaagatggagttgctctggtttaaatagttctgacatattttccccaatacccccaaagggacccttaatcccaaaatttgcagacagatgaagatccatcttctgtagcttcttctggctgaatacaggtgatgatatttttgcgtaactattcagggtagagaggagctcagtgagaaagcatcagtatggtgaaggccattcctaactcccgagttctcacaaaaggtgatatctggaagattaataagtgttcaatttaagaaaacgttgagtagtcttatcctgcattgctacacaaagagtaccacagcaatatattctacaacagtaaagcaaaataagtataattatcccaactaaactaaataacaagcctttccatgaactaggcagttgttggaaccaagcttatatggggttgctagccaattccaacacatgttcagaattaaaatactgatccagatatttatgttacccttctgtttcttctgagcagcagctagagatcactggttggttcataggaacaaacagggtcaatctaaatggcagaaaaaactcgaaacaatgaatgggactagagttgaataacaagtataccatagtttctgaaacataatttttctctctccagtctcccatttctattgaaaacaaatcatggtaggactgatttgtttgcacagtaagctttagtcttattatgcttggcctggttatttgtataaagcatagcaataataattatttgccacgtaggctttttaaaaattgactttgatgtaactttgttccataagaaatctcagattagactttctaaagccttgagctgagacacagatttatctgtgcctgcaaatacttgtatgagttgtgtgaattctccttttgagatcccaagataactggagctcctaggcctgtcagaaagtgacattctttacttaccacaggtcaggaaccctgtaaaggaattgaatagacaaggtatgaggccagcttttcccagaggctttcatcagttctgtaagtcaactttgattccttaaagcaatctgtttatatttgaaagaatgccattccagtcaaagccctggtaaaacaggcagtgtctctaattgtgtcctgttacaaaggaaaacagatttttattgcacatatgcaaattactatgctgccataagttaagaatactcacaaatagttttcaaattcttgagaaatcaggtagaaagaaatatgctccaaagttttctcataggagtataatttactcaatttttaacaactgtaaatagctcaaaaaaaaaggtttcttgactctgaaaaatgaaacaaaggatcagcaacattttaagcaaaaagtcactagaaggttattttgttcttttattagtttagtccatgctgttaattcctgtttgctcaatatttatgaacatattggtttcccaagggagactcttgaaagtttttttcctctctatcttaatggcacactttacaaaatttttcagaaacctgcatttaagagccctctatctgattataaaccatcttttaaagaggatcaaaacaagacaacaattttctgtggataacataaagtcttaggaaagccgtggttaaagacacaattgactagaaattttggttacttctgtggcatacaacaattttacataacagttataattattactgataacataaactaagtcatatcagaatttaggagtttcccataattttggagcacataccaataacatatttatacaaatacaactcaaagaaagctaaacaccatttcatatttgacagtgcttcctgtatgattttaatataccaagtaagccaaatatgtcatttttggacttaaggggacctcatatctaaagtattgaccagatcaggaaaaggcataatatagaatttgattttggaaagtttgtcaaatatcaaagatttaaaacacttgatattataaaatcgaatcccaggtcactgtaaagtcatttatttagccaaaatgataatacaaagattttccaaaagcaaaatcctttttttttttttttttttttgagacgagtctggctctgtcgcccagctggagttcagtggcgccatctcggctcactgcaagctccgtctcccgggttcacaccattctcctgcctcagcctccggggtagctgggactacaggcacccgccactacgcttggctaatttttttgtgtttttagtagagacggggtttcaccatgttagccaggatggtctccatcttctgacctcgtgatccacccgcctcagcctcccaaagtgctggtattacaggcgtgagccactgcgcccagcaagcaaaatcctttactcattgatagagggaagacagctttccaaacaatgtctcactttttcttctttattttgttgtttattcaaaaggcaaacaaaaatcttccatgatcttttaatattacatgaaaattttgttcaagagagaaagccaaatttcatctttgcattaatgaatgtcaaatccaattcttaagaaaaccttgtagacaaattattcaatcttaatcaattttaccatgagataagattctcataaaccttttgtagtcctttacaatttttttttgttgttgttaaagagcagattaatgctctaagaaaaccctgttgtgcttttattccaatgttctatttatggaaaaactgaataataccctttaactttagctaatattttaacacacagaatttcttttacaagattaattttcactgacctcccacaacttactcaaacctttagctttatcctatgtaacttaaaacagtcttttaactctgtaaactaggcaataagaccacattcccatgccttcttataatcttttaccaaaaacacattctattttccttacacgccttgcaggtaacactgtttctctggtagcctcaattacatgtgctacaatgttaactcttagcaacttttatatttggtgaaaagtctgataaataagtggttttaattatgtaccaggtgtggagcctaggacgccagacagaagtgcagataaggtctgagtctttccagcatagctagggggcatggccaactccacatgtccccaggccctacctagaatctaatggctccaaagcaggtgagttgaacaattatcaagttaaagaagcagtttatggcattgaagcattcagcaaatctaatttaatctgacctaatttagaccagatgtctaaattttgaagacatttttattttaccaatatatttgattctctttatttcccaaagattattaaagtcccatgaattaaaaggtgttaaagtttttatttttctgacaaaatattcaatttaagtgcttatttttcaagccaattaattagagctcttttctatgcatatcacacatacaacacacaaaaatacacagacagaagacccagtagctgttaattttttcatttgccagcttttaagaatcttaattggattactggcttcagggtggagcaacgtgtggggacagagccgggaaaacatgcagtttctggggcctaataaacaggtgcagttagaaggcaaaacagattccccaaaattacagatctcatttttatattggattctggatcccaaaaagagggaatcagcccatcccctctgggagttttggaaggtgtagaagaatgtttccataccttctaggtggccaagagcatgcttctctgatccaaacgtgcacagagtggggtattcccctataactgctattagccttcccttaaagcatatttcctgcctagttattacacaccaaggttaaaagctctcccataatgcaaagtaatttctgatacccctacaagtaaaaaacattaggtaacacaatgcaaatcagagcaatgccttggattttgagagggatttgcttgccttcaattcctggggttccatgaggaaaacagatttttcccaaaatggagcctgtggtgctccctcagttttttctaaggaagcccaggctgttagaaatgatcttaggtcctctcaatgtgggcatcaagagtggcaagaaaacaaaatgagaaaaacaattcagttgactgagaagaaaaaacttttatctagaaaaaaatcaatataaaacctgccagatagatagatagatagataatcttggacatcacttttaattaagctgacttttaaccaaatctcttattatcagactctagccaggacaaacagctaatatttctggcttttgaactttaccaaaagtaacctcccaggtgaaaccaataagccttaactaaggttatgatttaaccacaggtgtgggaggtattttcaaagaggtggtaagcagtttttacaagatctggaacctccaaacatagctcagagaaaggaagattcaagacagggagtcagaagttgttcatgaggggaagataattaataaatggcaaaggtcacatagatatcaaaccagaaaggactcattcccgaagctaggaattgaatccaggccaccactgtgaaatagcaaagccttagttactgagctgcagtactgcacagtctccattgctcctccgagaaggagcctagagcagccaattttgagcttgcaaaggcttttaactgctcaagataatttttaggactaattgacaggaaccccaaaattcacaccctctggatggcagagatcaggagaaagtacccccacgtggttacaaggtcaagctttcaaggacataaaacaagacgagagggaaacttcatccagtttttgtttcagggacctgcagaaaagtttgtaactgaccagtttgcgggccagcttgaagaccagatttgtaggattcctaggcctgcattctatcctgtggctagctagggctgccataatagaatattacagactaggcagcttcaaccacaggtgtttattttctcactgctccaaagtctagaagtccaagatgagggtgcctgtaaagctgatttctggtaagagctctcctggcttgtagatggccaccttctccctatgtcctctctgggcctttcctctatctggccaagggagctatctctggtgtcttttcctcttcttataaggacagcaggcctatggattaaggcctcactttcatgtcttcatttaagtttaattacctctttaaaggcccgatgtccaaatacagtcacaccgtgggttaggatttcaacataggaattttagggacacaattcaacccataataggagggcattggaaggagagtgttccaggcagaggaagtagtgcagtagagcatatggaagtaggaaagtgaggagcaatggaaggggttcagtatggtttgagcgtggggtgtgtagagggtgaaggctatttcacccagtgcagtaagctctatcatccacaccggggttttacagtgggagaaaggagggtgtttatttgcaggtcaagaagcaaacagaatcagggagctcatgcttaagacctgaactccacagtggcttacatgtaaggtgcagaggttacaggcaaaggcatcaatcaacacatggaagccatatattggtttggcctaaaaaggtgggatatcctgaagtaggggcttacaggttacaggtaaatccaaatattttctgatttgcacattgtttaaggaaggggatatttgtctaaagatgggatcagcaggccaggtgtggtggctcatgcttgtaacctcagcactttgaaaggctgaagaaggagggtaacttgaggccaggatttcaagaccagcctagtcaacatggcaagactctgtctctaaaaaaaataaaaaagaaaaaaagaaaaagaaaaaaaataaagatggaatcagcagaaaggaatgttaggtctggcccatgggcggacttcctccagacttctcagaaagaaatttaagacaaagaatggtgccaggcgtggtagttcacgcctgtaatcccagcactttgggaggctgaggagggtggatcacttgaggtcagggatttgagaccagcctggccaacatggtgaaaccccatctctactaaaaatacaaaaactagccgggtgtggtggtgcacgcctgtaatcccagctcctcaggaggctgaggcaggagaatcgcttgaacctgggaggtggaggttgcagtgagccaagattgcgccactgcactccaccctgggcaagagagcgagacttgagactccatctaaaaaaacaaaatggaaaacaaagaatggtgataattcagtcctcaattccttttcttttttttttctttctttttttttttttttaactgctcctgcggagcagggctacctcatagccagtatgtccagagttgtctcagttccctcgttatctgtggtctggaggatccatatgatggtgatccaggttctgaaaaacaactctggaacatctgttaagatgttatctttagtttctataggaaaccaaacatcttctgactctgacctccttggtgattattttaagctactgtttccctttttgcttatcgagttgctcatttacttctcaaggctagcaggatgactggactttctcttgaaggaactcaagctgttcctttatttttatgctcaggggcggggggcactcagcaggtccctaagaggtatccccgctgtgtctcactatgggtgaaggctcagcgggaagaaagctagataccagttggaactctcttaaagtaaggagatcttgggtactttattaatatttttttcaagctttggtaaagtatgaaataactctggattaagaggagaagaactagaacttaataaccatgacatttgggcaaattgtttgaagcctcagtttcctcaacctaaaaataggaattataactttttgaattgttctgttgtatgagataatgacagtgaaatattttggagccaaaaagcaatgcatactattgggggttattattattttttgatctttcagcaagccagctatagtagcttttcctatataaacacagtatgaattcagtgccctcgctttcctgaccctcacagcattcaagccctgtatggaccgctgagctctcccttgaagcaccccttagtccagtattctttactattttcccctttaacaatttaaacttctttcaaaacaactggcagtagttttttaaaaaagaaaacaggctactcttcaaattaaaaaaaaaattgtcttgctttaggaaaaatgttcttctgtcttttccaattatcttatttcttctgcctctcatctgccttgcctaggcagaattattctcaagcctgcacatgctgctgtgcctctctggcttctaggccaaaacataggctaatagtactcttctcagctcactgagctctttcctgccgtcattcaaatcacctctgaaatcctgccttttgataaagtaatttctgactgatcagaggaaagtgatgattttctctgtgacatgtctttttattttccatcacactcagtgtcttgtccttctatgcaacatatccatgtatttaaaaacccttgtatatgtatttgccatgtatttgtgaggtatagctcgtgaagtaaaaaaagtctttatttttttaaacacatcatcatttcagcttcaaagtcaatgtggtctcttgagaagttaaatatgctgcatttgaaattttatgtttctcatttttcatgtttttttttaaagccccttttaattcctcatgtatttgaatattccaggaagctagtagagtaaaaagccaaagtgttaaagtgtttataaggaatgtgactcatcgaaattgactcacacaattcatcagctattgtcatccatatgttctcattatttatgtggcttttgctttatttaatcagatgactgaacttatcatcgtgggattttgcttgtagttgtttaatattatataataaaatactcttgtgtgaaacaagttaattgactttttttaattaaaaaaaatttatgtgagagtcaggagttacatgtgcaagtttgttacatgggtatatgttgtgatacaaagattttagcttctaaggatctcattgcccaagtagtgaacgtagtacactataggtagtatttctaaacacttttcccctccccctcttttggaatccctagtgtttattgttcccatctttgtgtctatatgtacctaatgcttagctctcacttataagtgcggacgtgtgatattttggttttctgtttctgtgttaattcatttaggatagagagactccagctgcagctgtgttgctacaaatgacatgagttcattcttttttatggctgcatagtattccatggtttatatgtatcacattttctttattcagtccaccattgatggtcacctgggttgattccatgtctttgttgttgtggacagggctgtgataaacatatgagtgcagttacctttttttgtataacagttcataataaaatactcttaacagtagcacagaatttagattgcttttcaggctagaagggataattgaaacatagaaaaaaataatgactcctaagcatagaaacagacccaatcataaagctctcttcctctctttctgcctagtgttagatcttattcattgtcttaaagcactgtgaccattttcagtgaaatcacagttttattcatgaaaagacaatgaattggtgtaagtaatcatttgaggatgaaggtgactagtctgtgatcaacaccagtacttgaagtacttgtaaaacatgaattgaccttggttaaattgcagaaaataaagtattagtatacataaacacattttctctcagcattgaaaagttatagtctataatttacctgcttgctaagaataaaaatattacttagaggtttatcaagaccttttttctacaaatggatttaatgtacagaattattccattttctatctgtgctctgtatactaccacctagtggaataaaatgcaaatttacctgtcaaaatcaggagaagaaaatgaaccaggggaaatttatttcaggaaaaaattttcataacacgttattgttacttcttttagtataatgtagtttgcataaaatacattagtttggagtgaaaaaagtcccagccatttttgtgatagctattaaaatgctattagtttgtccacaaataagctattctattcagaaacttagaagctaggtaaattattgagatgatgccagcatattatatctctaaattatgttaagaagcttctctaaattcctcatcactagggtgtattagtccattttcacactgctataaagaactacctgagactgggtaatttatgaagaaaagaggtttaattgactcacagttctgcaggcttaacaggaagcatgactgggagacctcaggaaacatacagtggaagaaggtgaaagggaagcaaggaccttctcatggcagcaggagagggagagcacaggggaagtgccacacacttttaaaccatcagatctcaggagaactcactcactctcacaagcacagcagggaggaaattcacccccacgatcctatcatctcacactgggcccctcctccaatttgacatgagatatgggcagggacacaaatccaaaccgtatcataggatttgttaaaaaaatctaacatgttctgcttcaaggcacccatgaaatgaaggtgtcatttcttaactgagaggttaaataaaagtgcagagataagatggttaagttttatcgtagctgggaagaaaagcgggtgtgtgtattatgcttaggtttttcctcccaaacaatgaaacccaaaaaggcaaatgaagctttaaggcgctttatcctttactggtaggatggtcctcctttaatcttcagtctctgttaaagaacaaacacaagctaacaatcaaaacctgttgttgcttgctgacggatttctctaacatagtcttccatcaaccatcataggtttgttgtggccacccaggccctttggtcgtcatgttcccatggaatgctaatgaaattaccttcccatttcctaaggtgacatgcctttcagatggcattggtgtgtgcttgtgtaaacacatttttttgtgctcatgaatattttacctgcctgattttggtgatctgagtgttgagcagtgggtgagggatggtggggcaatgggtagtaaggggaagtttaattgaagttcagataaaaatatccctccagaaacattacaaagccacaaaatcagctgaagttgagtcttctattgtaaagattctctttcttctcctgacagatccccattcctatccaggtagaccaggctctagtgaagattggacacaagtggtttatatcccgaagctcttaacctaagagtcctgccttgtttttttacttcatgtggtcttatattgctgaggatagcccagtgatcatttctaccttaatatgtagccttcaaaacgttgggtctctcagttttcttccttaataaacaatgaaccctaattatttataactgctcttgtgatggaggaattggcatgattttgcattgtgggcttctggctttacagtgtttgtgggaaagatggtcttctatctttgttatttataagtcattcattccctgtttttttgaagatattgttaaataaaaaaacttcagctgaattaaatttaaaagtttttaattgagcaaagaaccattctcaattcgggcagccttcccatccagagtagtccctgtgacttcagtgcagccacatggtggaagaggatttatggacagaggaaggaaagtgacatacaggaaacagaaaagagattcagaaacagctgaattggttataactcagcgtttgccttatttgaacatggtttgaacagttggccacgtttgattggccaaaactcagtaattggcacaagagtaggctaccatctgtttataatgtccacttaggttatagttcatgatgtgcaaagaaacctttaagctgagcttaaaatgtaatgaggcagctgtaggctaaacttgatttaacagtacttatccctctgttgaaattgcactcttgctacctgctagttgatgtgggcaggtgtgctaatgacacattcgcctgcacctaccacctgctgaagaccctgccatgtcctgaagcagtcacttaggctatgaaacagaaggatgagttagagaagtaaatattatattttaccccccaaagcctaaaaccatgtctaggttctcccctttctcaattcccaatcatgcaaccttgaaaggtgttatatagatagttgttagaaatatgtctgtcctccaaaaccctactaacacgcaaaaatggacaaatctagcttttttgctaaaatcctaacaactcagaaagcaaagcaaaatgaaatgtatgtactccattctcaggatttccttcttaaaaaccactaggctttgtgtaactcaattttaaaagtatggtaatagctcctgtaattcgatggcttcttctgggagacagatataaatctattctagactttaagactggtgtccacattttaagttacagttgtatgtacttctactttgttgcagccttctcttggagtcaagaagcctaccaaagccctgctctttgtactcttgagcccagtgggaccttatttttcaagtggaacctttaatccagtgtccctgtgggccaatcccaagtatgtaagagcctggaaaggtggaactggggactgcaagatgggagggtaagtaaatctgtgtctctgtctaaaggaaagacaccttcatgaccatttagttagtgccatttcacttcagtatgaacacatataatacttttcaaactttaatgctcattgtgtttcatggttaattttcagtttaatctttcagcaagccagctgtagtagcttttcctatataaacgcagtatgaattcagtgccctcgcttttagatgtgctagtttaaaggatagcccatggccctttgtaagggagaaacactggatatgatatctagggaagaactgaagtaagaaactacaacaagcatcacatcggtgctttggataaacttcccctgggcgctggtctctggctgcaggctgacggctggcattaaaaagcatctggtcctgggacccaggctctcagttggctccagggagtcatgtctggggaaggtgcccgcttcactgaagtgctgtcttcattgccacagattgtggccacacctgctgccaactggctgcgggacagccctgctttggctctgtcaggccagtctcataggccatatgtagctggcaggaaataaaagagcatttgaaaagtgttggacgatttcaggggtggacttggccatgagttgggaatgcccctatgggtgaacgagaataactggtttaagcagcatgggttcttgctttgcatgtatcaaatggtgctgtttgcatactcagggcagcagctgtcctagaaggtgactccatggcagtcttgtgggccctggtaggacatttaggtccaggaggcaggggagagtcacatgacgtgctgctggggtattagaggcaatgaccactggctttgacccctctgtagtcttgctgtatttcctttttcttttctctcctcacctacccaaattaaaaaagaacggttataaaagtcatccccactggcaactttagcaactgcattccctcaatgggtagagaaatccaaatggagtgcattaaaactaggaagtctattctccttctggcttagagcacaccttcctgtgtcctaggctagccaggttgaaaactcctttttttgactcttgatttctttttttactggttcaaacttcttcgcagagcatgtgcctatgtaccactgcataccatatatataccatatatagagagtaaataaacagtcttgatgaaaagtaataaggaaaaagtttccctgtttaaaatattgctttctagctccccgacctgtttaggaaaaagataacctggggacacagaaattgcagggcaatctttattaaccggtatttgggcaggttgtaatttattttgtaaacaatgatttaatgcactattgcagaatacatgatcactgtaggccagttaaaaattaatgttttcagtaccacacagagtgaaccctaatgtaaactgtggacttgtggaccacactaatgcaagatgataataagaagaaaaactgagagggtgttcgggaaggggtataataggggaattctgttaccttttgctcaatttctctgtgaatctaaaagtactctaaaataataaaatctattataaaaatatttgattcattaggctcaggtggactatgatccatggaaattgacttgaaatctcttaggaaaggaagagaccggagaagaaagtattgaactcataaattaaaaatggcaagagggaaggtggtaaccaaaaggatgggcatttaacctatatgcctatcacttccaaaaagttctagggccgtctcctcctatgcttctgacctggagaggtacaaggggaacaaaatattccgcatttaatattatcctgttgagttggcaaagacatttggagtcaactttagttttgtgtattattacatctgtaaacctaattaagtcaacagttacccttgacacctgtagtcaactggtattattaaataactattgagtctcataaagtcaagaactttctgctttctatctaagtgaatctagggcagagactgagcatcaggattctttagcatgcagccaagcttgagaagcactgagctagagaaaggtcttgcactgtagaaacagctttagttccaggtgattccttggttaatttgggaggaataaggctttctgtcactctctctctctttctctctttttctctctctcttgcacatgcacacgtgcacacacacacacaaattatctctcttagttttttcttttttccttgcattctgattctgcatttaagagtacaagctttgaagtcagaaagacctggcttaaaaacctaactgtcataatggtgcgtaaatgtcgttatagatttgtccaaacccatagaatgtacaccaggaatgaacactaatgaaaactctagacttcaggtgataatggtatgtcaatgtggttcattaatttcagcaaatgtaccactctggtgtgaggcattggtaatggtagaaactattcatttggatggggagaaagggatatgggaaatctttgtacttgcctttcagttttggtgggaacctaaaactgctctgaaaaaaacctgaagtctttaaaaacaaaccaacctaattgccttgggcatgttacttaactgctctatgtatcagtttcctcatttttaaagttgaggcaataataccttgcacagattaagtgagataatagaaagtgcctaggatagtacttggcatatagaaagctctcagcaaatgcagtatgataacctaatggttaaaagcttgggtttaggagtcaaatgtctgggagttacacacttaactatctgtgagatcttctacaactgaatcctctctccaagtcttccaatgaacaataaagtctagggttgtttttagatgactcaatgaaataatgtagttaagtacttagcacccagtctggcaggtatgggttgcatatctcttatctgaaatgcttgggaccagatgtgttttggatttcaaattttggagtatttctctttgggcatccctaatccaaaaaattcgaaatccaaattgagcatcatgttggcaccgaaaaagttttagattttagagcatttcaaagttttaaattagggatcctcaacctgtagtaaactctcacagtcactgatgttgtgaggttttctcactttctcatttcatttcctggactctctttatcttagaagaaatcagttaaattttacataatagaatttattcttttggagggatgtatttaatatgtctattctcccagataacctatttaaaaccatattgaaatgtttctatgtcaacagctttcttactttttcatttttctgtttcctccaagaacatgtttctcttatgaatattggcagcacatgggcgggaacccaactatattaccatggtatcagttatcctgtggacattaataatacagcttacacctgtgagagaactctgggaaaattaaaacttgtttgggggaataaagaccatctacagaatataataatacatcaatcaatcaattaaaacttaaacataaaaaacccttttcttttcagtgcattgaaatagtcactgtctttaatcctctttccttgctcagtgcttcatgaagctgaggagccatggttttaattcagctacactttcagaaatgtgtatgcatttgtatttagaagcttctttgaaaggctaaatattcatcctgtaagaattctctatgtgttttttaatacagtctaaagggcattttgtatatgaaaaaataatttattttcaggtagggtaaaacttcactgcttcactacttcgtagttgtgtctacgaatgagaaaaaattcaaataaaatagttattattattagtttttagagatgcagtcttgctgtgttgcccaggctggtctgggacttctggcctcaagccatcctcctgcctcggtgtcctgagtcactgggattacaggcatgagccaccacaccccactgaaatagttattttttaaaaaacttaatttcattaggatgtaacagtctcatgtaactcatcctttggcttttattgttattatttattttttccaagcaacccaatgagatatataaagcagatatttttatctgccagataattaaatgagggaaaaataaggactaacttgcttaagttcacatataccaaatagtggaaatgcaagagctgtcctcaggtctgttaacaacaaacctgtggtctttctaccagacgtcccctgcaatctggtttatactcattattaaaaagcatttgtaatttaactcagttatctatttactatcagttatgaataaggattatttgactttttatggtcattaaacaatagcttcctatctgttgtctttgtctttttaatttttatttattttattgtttttttaatagcttcctatctgtataccagacttgcttcatctccacattgaccaagaatttatattttgtcatctgtatttagaagcatatgttttaagcgtcttttaatggctctttttttttttttgctgggaggggacagtctcgctctgtctcctaggctggagtgcagtggcaccatctcagctcactgcaacctccgcctccctggtgtgagtggtgctcctgcctcagcctcccgagtaggtgggattacaggcgtggtccaccaaacccagctagttttttatatttttggtagagacagggtttcaccatgttagccaggctggtctggaactcctgacctcaagtaacttgcccacctcagcctcccaaagtgctgagattacaggtatgagccactgtgcctggcccttttaaggactctttttttttttttttttttttttgagacagtctcactctgtcgctcagactggagtgcagtggcgcgatctcggctcactgcaagctccacctcccgggttcacgccattctcctgcctcagcctcccgagtagctgggactacaggcgccagccaccacgcccggataatttttagtatttttagtagagacgaggtttcaccgtgttagccaggatggtctcaatctcctgacctcatgatccggccgtctcgcctcccaaagtgctgggattacaggcgtgagccaccgcgcctggcccttttaaggactcttaacattaccttggtgtgagtcaacctcatcgtgctccaatggcaatcaccatagtatgatgtctattttccacagcttactggaatatttcagctattagtcaatattctttcagttgcaagtcagaaaaccaacttgaaattattatttatttatttatttatttttttgagacggaattttgctcttgttgcccaggctggagtgccatggcacaatctcggctcactgcaacctccgcctcccgagttcaagcaattctcctgcctcagcctccagagtagctgggattacaggcatgggccaccactcccggctaatttttttgttatttttagtagagacggggtttctccatgttggtcaggatggtctcaaactcccaacctcaggtgatctgcccacctcagcctcccaaagtgctgggattacaggcatgagccaccgtgcccggcctggaaatgatcttaagcagacaagggcttatgaaactaggatgctaggggctaaagcaattatttccaagtttcttgtgtcctttgcacatccccctttttcttcccttcttcctctgcctctggtcagagcttctggctccatgttggcctagggctctcccacttcagccgctttcttctgtgaagtgtggtgatcatggacacagccgaccccagttttacagcataccaagtaagcaaccccagaagggagaaaatgcctgtatttcaggttatagacattaaaatgagtgaatgcacccaaaaaaggaatcatgtgactgtcttaggttatatgcccaccctttaactcagctgcagcagggcaagatgctatattgtcatcagttgtggtagggcaagatgctatattatcagtccaagcagaatgacatagctctatagaaagactatgtttttataagagtatggaatatagtgcagatgaaaacagtagatatacactaacatgtggctctaatgtttaatttttattttttttgagacagagtctcactgtgtcacccaggctggagtgcagtggtgctatcttggctcactgcaacttttgcctcccgagttaagatgattctcctccctcagcctccctagcagctgagattataggcacccgccaccacgcccagctaattcttgtattttcagtagagacatggtttcaccatgttggccgggctggtctcgaactcctgacctcagtgatccgcccatcttaggctcctaaagtgctaggattacagacataagccaccgcgcctggcctcatgctcaacttttatttagacaacagtacaaattgtaattttacccagatgtaaaagagtctaagagacctaaatagatattttgtggtagattacattaatgtaatgtaatgtaatgtaggagttttacattactacatttgtagttgttttagttgtttttcattgtttgtttctgtgtatttctggggatttcatggtgcaacaggaggactagagtttattcccgatccctgactgtcttacggcagtacttctcagacctactgagttatacaaccaggggtgtagggaggcaagcagtcatcacatttatttgaggactctcatgttttgtctaaaatattcatccttattttataatatactccataattttcccatataagtttagataaaagatgataccttaaaagtattataacactaaattgtcattccgggaaaatgtgctgtgttcctttcattttaaataatctgagatgaatggtgcaggctgagaaaaataggcttttgaaatactttttggtcaacatcgagacttttaacatttgtcctatcttttaggggaatttagacattgggcattatgtattccttggatacattaaaaggtgttagataagagcgctcacacttgctgctcttctattgcaacttgacagaagttacttctctaaaccttagtttctcatctgaacaatggaaataatgatagtgtctatctcatagtattggtgtgagatttaaatgaaataattcatgtaaaattgcttggtgtgtggaaacatagtaacttttaactgttctcattaacttggctatttacctgtgttcttctatcattacatttcaagttaaaatttcaaggtttcacgttgttctctctccaatgaatgcagttaaatcacttagattttctaatgagttttcctttaatgttatgcagttgactagagagtgtatatatattaagaacataataccttcactatgtccacatgtgaattaagagcttgaggctatcagagggtagaagatgagggagtggggatgaagtatgtttgtaacctgtgtattttctctttcttaaaggaattacggctcatctctttttgcccaatgtgaagcagtagataatgggtgtcagcaggtcctgtggctctatggagaggaccatcagatcactgaagtgggaactatgaatctttttctttactggataaatgaagatggaggtaatccactcagatttcactgtgtgcatttctcagtcattttcaacaggaccagaaagacaagagctagaaacttagtacaagggagtaagtagcacagttccaaaggctaagtaaggactactgtgcttttgctgcccaaatagacacaagtttcttttttttctttctttcttttttaaagaggtggagtctcactatgtcacccaggctgcagtgcaatggtgtgatctcagctcactgcaccctggttcaagcaattctcctgcctcagcctcccgagtagctgggattgcaggagcctgccaccatgcccagctaatttttgtatttttttttttagtagagatagggtttcaccatgttggtcaggctggtcttgaactcctgacctcaggtgatccaccggccttggcctcccaaagtgctgggattacaggtgtgagccactgcacccggccgagtttcgatttaaagaagctctagaggttttttgtttttcgttttttgtttttctggctctagatgtactgattattgagatactgagatgtcacattaagggatttaagttaccatgattggaagatttgcttccttatcccttctgcagttccccaacaattttcctatctgaacaccttgcattgagacacaggtctcagatcaggtcaatggtcattcaccatataccgtatataaaatgctagagtaataaatgcagtgtactgattctactggaaggattttgtgtactctctggctgtaattgttttaacaattgttgccttttctacatattttgaaaatgtatcacaatctctccaaatttactctagaactcaatctgattaaagagcaccattttaaaagataaatcaatgtatcttgggattgtaactagatcctggttcattcaagacaatttcatatatccactatagatatcaatatttctctattatctttaatatcctgagtactcattacttttctttgctgtttttttttattagttggcagagaccataggggttcagtgaagtgttggcaacgtgtatgatattgaattaaatggccaacggtgggagaaaaacaggcatttatttctattagaattttgataatcataccaaatttagaagcgtatttttagacttgtttacattcttaggttgttcatttcacagtagtaattatagagactagaaatataaatgatgtttccaaatacttatgaagtctcagtgttagtagtttcaattaaattttttaaaatgcagtttatatttgaaagtagctacagtagcctctcttgctctaatgttatttggctacaaaaagaggaaaatggtaatttagatgtggctgaattcagagctaagtactaattttagtgttagttgcagagactaacaagatgagtcttatactgcagtcagaggtagaataaacagaagatatggtgagtaagccttgtcctgggcttggccattggtagtccttggcatatgaaaaaccagatacagatcattctcatccttccattcctgctgtttgtacttggcactgtttgaaaataaaatttatacaggaatatttatgatttataaatttgagttactgtatgtgacatataacaaaagctacacttggaagattgtagccagtgttgacctctgcacttagaagataataggccgattcaacccttcttcccatctgcccactcttacccccaccccaaactccaccaaaaaaccacacagctcaaaacaaaaacagttacatcattcagaggtggtaccatcattatttttatggatgggagatgtcagaatttaagtacactctgaatcagagctacatgatttaaccagaaacaccagaaactgtcctggtggaaaattgttctttatccaaacaataatcatgaaacatttccaccatggcttttaaaggtcagaatagaaatgagtgagtttgtcttctgcctcttgcaaaatatacaagaccttaagactgttagttactattcagattatggttgcctgggataactttagttttaatatactccttcactttggggatgttcatctaacagaacaaataaaattcagaataaggagaaaggaaatagaatatatatttgaagtaaatagaatgttaggaaaaacctttgggctaaaaaaaaagacatgcaattctgaagtaactttgatttatatcatatgattttaagaaaatacaatgaacaaacgagttgaaaatcagcacaatactgattttcacaaacgttaccgataggaggtataaacagagttctttcggtaatagcctgccgtcttttcatgagcgcccacacacactgctcctgttggttgagatggctggtgcaggaaggtggatggggtggtggatagtgtgtgttcaaagcacagtgctgtgcacagtcactatgtgtggcactcagcttgtaactcatgggagttttgatttcagtaacagcacccatggtggcaagatcacacatcatcactctgttgatgagtaatttaacccatacgcttgctattcaccatttgaacaaagcattgtatcatatcctggaccctggagataccctgaaaaataagacccaggccttgtggttgagttcacagtcactttgggaaaacaaccacagcagtgaatctcggtattgctcaggccacatcatgagtcttctcggacacgtcaggcgtgtatacggactcgacttggagcactcttcctcagatgtctgtaccgcttgctctttgacatcctccaaatctttgcttacaaatcccattctcagtctggctttccttgagctcttaatcaaaatcataaactccatttcccatttctcctcagcattccagcattctccattgcttttccttctttgtttccccctgtgtagtctaacatactatcaacacaataaatgtttacctgtgtctattagaaagtaagcagggagatatgtcagttttgttcactgctgtattcatagagcttaaaacggtaaacagcactcaatatgtatttgtagaataaatggctaattgtgctgatggtgtttagggcacttatgcagacctacattcctggtttccattagtgtttgactttgggaagtcacagatgaatcctgctgttattgcttctaaattcctcatctcctaaaaatgacttctttgtcaaaaacaagctgcatttgtaggttctgttttcctcatgttgggcaatctggagtgatttctggctcttgtaagtatgtttgtggttgcagaggaaaatgaatatttctcacccaaatgttgtcatgtcatcatctctgtctggcaaccagagaagcagatgttctgttccttgacctcaggctagtggttacagttctgggtgttaaacatgtttcacaaaacagcacttgcacatgcggggctgctgttttcatttaacttcatgtagtctcagggctcagcaagctttaggaaaggtccggtttgggggcactggaagtgtgtgtgtgtgtgtacatatatatacacacacaaatagatccatacatttatgtatctagttggctagctattgcaaaacacatgtttattttgagatcatcaacacttctaaacatgacaaagagtagccctaagaacattgccaagaacaaattttctcctttccagaaagcaattttcagcagatgattttcagaaacaaaattcaaaaaagccatactgctgtatcctagcaaagataacttattcgtttattttttactcaaaaacatttattatatacactctgggctaggcacaatgcccagttttgaggatagaaggatgaagatagagtttggtattccagatagagcttgattgttgggcatgtctgatgtaaccccagtggagtgggcgagcctagaaccaccatgtattgagggagagggtggtggcctcagtgtcaggactcactagattcagactcctgggtgtcagaagtggggaggaaagggagatgctgagtgccagagggtactgtaaggagagcttgtgcagctgatggatcatgcatgatgcctgtgaacaattgtcctactagacctcacagtagttagggatgtctgcagtcatctcacagtagagcagtagctcagctttggagttttgtttcttgaatgtcttcttttttaaccgtacacgtgcttgagctcactctgataagcccattacatttgaatctcagagagcaaaggcagcatctccatacttgttgctgatgctccaccaggtttgaaaatcactaaagatagactcttaggctgggtgcggtggctcacatctgtaatctcagcactttgggaggccgaagtgggcagatcatctgagctcaggagttcgagaccagcctgaccaacatggtgaaaccccgtctctactaaaaatacaaaaattagccaggcgtggtggcgcgtacctgtaatcccagctactcaggaggctgaggcaggagaatcacttgaccctgggaggcagagggtgcagtgagctgagatggtgccactgcactccagcctgggtaacctaaaaaaaaaaaaaaaaaaaaaaaattagactttccaagggcagcgtggaagcagtgaccagcctgagtaggcacgcacacttcttggggatagcctcctccatagcattcttagaaggtttggtaatgaccagtttttctgagtaagaccctatctacattattctaattagtaaccacctttcatctgctaaggtaaattttcacttcagaatattcctcttaagaccatgcaataactcttactgtttgttggtggaaaaccatctcattattttactggttaagggtaaactgaagatgattagataactttccttccttccctccccccttcctcccttccttctctttcttccttcctttctccctccctccctccctctctctttctttccttctctctttcttttcttttcttttttctttctttctttcttttttctttcttccttccttcgttccttcctccctccctccctctctctctttctttctttctcttttctttctttctttctttctttctttctttctttctttctttctttctctctttcttttctttctttctttctttctctttctctttccttccttccttcctttctttctctctctctccttccttccttccttctttccttccttccttctttccttccttccttctttcttctttttttaaataagggtctacctgaagtgtgaactgatttgggaaatttgatcatgcagaacagtaaaattttctttatgtttgttgctagcaaaattgtgatggttttttaaaaaaatggctattgataataaggcatgcctaatgtagtgaaagtttgaaaatgtcccaatttctgattgacagaagaagaactggcaactcctccactagatggcatcattcttccaggagtgacaaggcggtgcattctggacctggcacatcagtgggtgggtgcctttgatatgaacaacttttgtaagcctgaaataaaaaataatcaaaataagcccagcctagtgttgaaataatatcctgtggttccaaccaatgttatctaatctttaaattctaacgtgaatgaaaagtattcttctagaagggctttcttggcaagactattaaaataagtattgttgatagcaagggcagagagaaaccagtttagcaagatgtcatagtggagaagtattctagtagtagtctcagtctaccaggtatctcccaccaacttttgtctggttcatacctgatgtgcttccatccagacattccttaacttcccaagtctgtgttgcttccaaatggcaatgatacttcttcctttcctttatttataccagtgtaaccatgcttgccgtagaaatgaaataatttcactgacatataaatgtttactaatataacattattggtttgactgccttctttttctctctgtcctacccccatcctccaaaattcatatacatgcctattttaaaatcagaacatgcaagcaaatgtaaagttgttttcagtagactttcaaattcgtgtgacacaggcaagcatattaaacaatttggtggaccgggtgcagtggttcatgcctataattctagcattttgggaggccaaggcaggaggatcacttaagcccaggaattcgagaccagcctgggcaacatagtgagaccccgaatctacaaaaaaatcaaaaacattagctgaacatggtggtacatgcctgtagtcccagctacttggaggggctgaggtgggaggatggcataagatctggaggtcaaggtcgcagtgagctatgatcaagccactgcactacagcctgaatacagggtgagaccatgtctctaaaagtaaattaaataaataaataaataaataaataaataaataaataaataaaataaaatttaaaaaggtttggttttggaaatgacgtaatgtattcaagacaaattattgaatgaattgggtgtctggtaaaggttcttggatggaacttttgacccaggtgttaaaatggtctccaaagaacatgaaaaggctttgagcttactgtggtcaaagagtactagtagtaataggacaaatgtttagaaacacacacgttatctaggagcataccagcatggtttctctggaaaagactttcaaaatagatgaaatgtgctataaataattctacaaaaccctgaagtagacaagacccaactgctacatgctggctggcgcattgggcatgacatttacaaaccgttggtataattttcaaacagcttgccctgtcctaaatatgtttgcaattggaaagatatttttgaagctcagtaatttttgttttattaaagaaaaatatcaaccaagtacagaaggttcgacgacaagttgcaagtggaaatactttcccacactaatgatttgctagcatgaaaaataggttattatggaggaaattttttcttgacttcatagctgtaatttattttaaaagctattttaaaacatgagacgtgaaatgccaagaggcatgtagggggtcaccactatttgccagataggggaaattgtccaaagataagtaagggtgagcagagcaaaaacaattctgcttatttacaaaagagttttcttttcttttctttttcaggacacagaactcagcttgttttcaattaatttgcctgattttctgcagttcatttacttttgaacaacataattgcaattgtagactgagagaaattgaaactttcaaagagccatatttctattgcagatatattttcctgctcttccaaatctacttacagcatgagttcttcttttaaatattcaaatattttgaatattgccaagagctttgatttccatttttatctcttgtgggtttataaattaagaaaaaatactcatcttatttttttaaacctctctatttttattgccctttattcaaataacttgttgacaaactttgaacttgaaccactgaggtaaaagaacaagaattaaacagatagtttaaacacatagcttaaaaggatctttttcccatttcctatccttgagcaaagaatatattcaaacactttggcagaagtcaatgaggttataccactaattccatgatgaaaatcaactgaatgtgatactgaaagagaaggaagagaattgtcactgtaaagtcaactgttagtcatattaggaaaaaaaatacatacaatacaatttctcaaataaagtccaaatatacattcaacgtttaaaaataatgagtatttcagatatttgaactcagtctgttctttattccataaaagatataggtaagccgtgcacagtggctcacaactataatcccagcactttggcactttgggaggctgaggtgggaggatcacatgagcccagcctgggcaacatagggagacccctatctttacaaaataaaatataaaatataaaacctagttgggcatggcagcatacacctgtagtcccaggtgctcaggagactgagacaggaggatcacttgggcctgggaggtcgaggctgcaatgagccaagattatgccactgcattccagcctgggtgacagggcaagaccctgtcttaaaaaaaaaaaaaaaagaaagagacaaacgtagaaagagtaccaaatttggagccaatcagatcagacctgggttcaaattgagtttctgtcacttacttcctttgtggccctggagatgcccttcaacctccttgaaccttagtttcctcatctgtaaaatggggatgatagtactcacccttaaaattacagaacttggcataatagcgggtgcttgataaatggtagctataattattaatattatataatacattgttctcctttatggtaaagtaggttttaagacactgatttttttgttttgttttgtttttggagacagagtctcactccgtcacccaggctggactgcagtgacgtgatcttggttcactgcaacctctgcctcctgagttcaagcgattctcctgcctcagcctcctgagtagctgggattacaggcacccgccaccatgcctggctaatttttgtatttttagtagagacagggttttaccaggttggccaggctggtctcaaactcctgacctcaagtaatctgcctgcctcagcctccccaaatgcagagattacaggcatgagccaccgtgcccggcctaagacactgttaacacggagcatgcatcaagcagcatttgggatgcatcaattttgtgagactttatacaagttaacaaataagaaggcaaaaaagaaggcatatgttaaagtataccatgtgtcttgtggtgataatcttatattttatattctgataatctcatatataaatctgtgaccttgaagtaggttacttaacacctcgatgtgttcaccagtaagatggtgtgccacttccagctttcccttaaaggatgattgtgaccttgtctaagtgcaatcagaatgttaagcagaacagtaagtattgcaattgttttgcatgccttttcctttaaaatatacttgttattttttatattccatgcagggtgaatttaaggtgtcagagagatacctcaccatggatgacttgacaacagccctggaggggaacagagtgagagagatgtttggctctggtacagcctgtgttgtttgcccagtttctgatatactgtacaaaggcgaggtacgacaagtatttcctcatttcctatcatttccaatcacattaaattacatttaatttaagtgtatgaataaaattgtatctggacccagacccaagatgcaaaagttttgtcgttgttgttgtttttctttattttaaagagatggagtctcgctgtgttgcccaggctggagtgcagtggctattcactggtgtgatcatagctcactgcagcctcaaactcctgggctcacgcaatccttctgcttcagcctcctgagttgctgggattacaggagtgcgccaccgcaccatgctaggtcttttttgttgttgtttttgttttttaacttggcactacaaaaaaaataactgggacagtttatccagatgaaactgtattagcatatatctactatgtttccagtgatttcatgtaagcttaaacatggtgggaagttagttttgtccttggacacgtgtaagatctgtcttacctacatgtcgggattggagctatgccgacagtcttctactcttctctcttccttcctaccagctcactagggaaggctctataggtagttacatttcagtttctggttaaccaaaagtacttccaaaccactggattaggaatggcaaatagttatggaaaatgcattcgagtggtcaatcccttgatttttttttactattaatgctgttatcattaatagtaagtagaccactttacaagaattattcattggcaaacctggtgcatttactaaaatcttacaaaaggaatttgaggatttggttggaagaaatgttctcctcttagtaaattagtctgattttatatgtgccatacttttgttttcttgtcaaattgttttgcttttcactttataacaaagctccaatacttatgattaacattggcatctaactttataacttaaaggcatgtaagtattagtcttataatgtgaactggcttaagttattcatattatagcagatccttgaacaacacagggattaggggtgtcaacccccatgcagttgaaaaatccacatacaactttttttgtttgtttgtttttttaaacggggtctttctctgtcacctgtactggagtgcaggggcacaatctcggctcactgcaacctccgcctcccaagctcaagcgatcctctcacctcagtctcccaagtagctgggaccacaggtgtgcaccaccacacccagctaattttagtattttttgtagagacggggtttcaagatgtttcacaggctggtctcaaactcttgagttcaagtgattcacctgccttgacctcccaaagtgctggtattacaggcgtgagtcaccatgcccggcccacatataacttttgacttcccaaaaacttaactactagtagcctgctgttcaccggaagccttatcaacaacaaaaacagtcgattggcacatattttgtatgttatgtatgttatatatgtattcttacaataaagtaagttacgaaaatcatggggaagggaaaatatatttactattcattacatggaagtggatcatcataaaggtcttcatcctcattgtccatcatgttgagtaggctgaggaggaggaggaggaggagggattggtcttgctgttttaggagtggcagaggcagaagaaagtccacgtataagtgaacttgtgtagttcaaacccgtgttgttcaagtgtcaaccgtaaatgcaaactccactggttttcaaattttactttagagttattttccctcagctgattggagttttgctcaactcctctgactttaataatggctgcttcatttgttgaggttttagaacttgcttttaagggattgctcttgacataattgcatcaacagatagactgtttcatgggagaagaattgttctgtttcatgtcaatacttacattgataagaatgcatcaaggtaatgtgatccatccactgaagttgtcattaggccagattttttttaagttgaattattatttcacttctagaaataagaagtttataaagtttagcataattttaatgatccaggcttaggaagcatttacagccaaaaagtaagtatatataattatcatattatactaaagggtataatatgaaaagtgtttgagagcacagactatctcctaaaatcaaactatcaaaacctgcaagccagcaaggcatgagtaggcatgactcagatacaaattagaagcatgaaatctctttcagccatgcatttaatcatgctatccaatattgtggaggtagtggcccctggaagtttaccttgggccagagataggtatagaagccccttttatgaagtcatagacttgctttaatttatgctcccagaatgacttgcattaaactgtggcaaaatatctttgagttctcatattagccagagggttaatatgtagaagacaatcattcatccttacagattctcagaatcttggaagaggtagggttctttaagtttagccactattttaggtaactgtagctcctccttggttcttcaaatgatcctgaaggctggtatacaaaccagttatgccctaaaattaattggtaggtaggcaatgtataacctgtcattggctagtttttattcaaattttggatatgaaagtctttggcataaggtgctagcactcagagtcagtaggttttagtgctattccttaacttcagtggaattgccttagtatagcagaattgcttgagtgtcttatctgttatcaccatatacatgagtaccctcaaattatctcatttccctttcttttgtagacaatacacattccaactatggagaatggtcctaagctggcaagccgcatcttgagcaaattaactgatatccaggtaaagcttttcttttcttttcttttctttccttttcttttcttttttttatgtcaccttatttctgtcagagcttacaactaaattatatttcaatgaagaggattaaataatacaatttgagatcaataagttaaatttaaggaagatattcccaacacaatgtgtgggcatgagcaaagcagaaatgggaaagaagatgtatgttttaaaaaaagaaagaaaatattgttcaggactccacattacttaacattaaaaaatagatgtaatttttggtaacatttaaaaatctcattaagaaggataacataacttttgttaaaaaaaggaagaaaaaatttgaaagtagaagcaacttcaggaagaaaattacagtgcatgtgattccaacactgagatataatcactgttaattttttatgtctttttatttttgagctggagtttcactcttgttgcccaggctggagtacgatggcacgatcttggctcactgcaacctctgcctcccgggttcaagcaattttcctacctcagcctcccgagtagctgggattataggtgtgcgccaccatgcccagctaatttttgtgtttttagtagagatgggatttcaccatgttggccaggctggtcttgaactcctgacctaaggtaatccacctgccttggcctcctaaattgttgggattacaggcatgaaccactgtgccctgccattttttgatgtcttaaccttcaatattttgtaagcatttatatactttatttatttatttatttatttatttatttatttacttatttatttttgagactaagtctcgctgtgtcacccaggctggagaacagtggcatgatctcagctcactacaacctccacctcctgggttcaagcgattcttctgcctcagcctcccgagtagctgggattacaggtctcatgccaccgttcccggctaatttttgtatttttagtagagatgaggttttgccctgttggccaggctggtcttgaactcttgacctcaggtgatccacccgccttggcttcccaaagtgctgggattacagccgtgagccaccatgcccagccagtatacttttagatagttattttttcctaacaaaatgggatcatattgtacataattttgttacatgttttttcactgaataaatgctttgcttttttatatcaataagtagttttctccaacaccatttataaagtttaattgaattccattatattgatgtaccataatttttttaaaaaattatattattgaacatttatgttgttggcaatttttttttcactagtatggacagtacatcctcgattacttcctaaggataaatctgggatcaaagagtatacacgtctattttttcatactgctaactttgttttgcctattttttttctgagcaataatctacagtaatgcctcatcaggcagttaagcaggcatgctaaataccagataacactgggctactcagaaaagagattatcctgtaatttgcaagcatttcacaagttagaagactttgttgaagccagttactatccttgtcaattagtaaaaatatccaagagggcctgagacttacattgaaaagtaaaataaagtttgatcatttgagtgatgtcggatggcattaagtcatgaaactaagtgaaacttaaaggtggctgagaatgcaacaggcctccagagagcaatggaggtccttgggtagtgataaaaatggcatttctggctgggtgcagtggctcacacctataatcccaacactatgggaggccaagacaggaggatcgcttgaggccaggtgttcaagactagcctaggcaacatagtgagaaccttcctctaaaaaaagggaaataaaataaaaataaaagtttaaaagagagtttaaaaggcagttttaaaagagacttactcagcaagttttctgccaaatttacagtattaaaaagaaagaaagtgtgtttttgtttctgtttgtttttttgagacagagtcttactctgttgctcaggctggggtgcagtggtgcaatctcagctcactgcaacccctgcctcctgggttcaagtgattcttgtgcctcagcctcccacacagcagggattatgggcatgcaccatcatgcctggctaatttttgtatttttagtagagtcgaggtttcgccatgttggccaggctggtctcaaactcctagcctcaagtgatttgcccaccttagcctcccaaagtgctgagattacaggcatgagccaccgcaccctggccttgattgtggttttttaatcaatgagctgccatacttctgctctccagcaaaggttttctatgagaattttctgtaagctaagtaaaggaatatcttaatattggaagaaataaaatttagtcagagttgttttctacctttgtacacagcaacacttacaagtaatttgaagagtagctaataaaaatttctgcatggatggcttaggcattttaatttttttaaggttgcctgagtaaatctgaaaataataaattattacagttttgctcaaataaagaacacaaatagaacaaaaaatacataactggctagattacatgaaagcctttttccaaaacagaggtttagaggccagggcaaataggcaggaaaaataaataaagggcatccaaattggaaaagaagaagttaaattagctttcttagcagatgacattatcttacacctagaaaaacctaaagactccctcaaaaaacctgtagaactgataaatgaattcagtaaagttgcaggatataaaatcaacatataaaaatcagtagaatttatatatgctaacagtgaacaatctgaaaaagaaatcaagaaagcaatcccatttataatagccacaaaaagtataaaatacctaggaatcaatctaaccaaagacatgagagatctatacaaggaaaagtataaaactatgatttaaaaaattgaagaaaacacacaaaggtggaaagatattccatattcatggattggaagaattaattttgttaaaatgactatactacacaaagcaatttacagattcaatgcaatccctattaaaatactgatgactttcttcacagaaatagaaaaaacaatcctaaaatgtatatggagctaaaaagaccccaaatagccaaagcaatcttgagcaaaaagaacaaagttagaatcaccacactaccttacttcaaaatttattataaaactataataaccaaaacagcatagtactgatataaaaacagacatagtagaccagtgggacagaatagagaacccagatacctaagtccacatgtttacaaccaactcatctttgacaaaggtgccaagaactgtaacggggaagacagtcttttcaataaatggtgctgggaaaattggataattatatgcagaagaatgaaactagattcgcttctcttaccatacacagaaatcaaatgaaagtatattaatgacttgaatcttagacctgaaactatgaaattacttgaagaaaacattaaggaaatgcttcaggacattggtctaagcaaagatctcattctgtcactcaggctggagtgtagtggcatgaacctggctcattgtggcattgacctcctgggctcaagcaattctcccaccttggctttccatgtagctagaaccacaggtgcatgccaccacattccactaatttttaaattttttgtagagatggagtctcaccatcttgcccaggctggtctcgaactcctgaactcaagggatcctcctgtctcagcctcccaaagtgctgagattactagcataagccactgtccctggccagcgaagatttcttatgtaagacctgaaaaagcataggctatcaaagcaaaaataggcaattgggattatgtcaagctggaaagcttctccacagcaaagaaaacaatccacaaagggaatagattacccaaagaatggatgaaaatatttgcaaactatcaatctgacaagggattaataaccagagtctataaggagctcaaacaactgtataggaaaaatctagtaatctggttttaaaatgggcatgagacctgattagaaaactcaacagaaaaaaaaatttgattaaaaatggataaaagatctgaatggacatttctcaaaagaagacagacaaatggccaggaggtacatgaaaaaatgcgcaacatcactaattatcagagaaatgcaaaacaaaaccacaatgtaaaatccacttgccctagttaaaatggcttgtattaaaaaaaaaaaaaaaaacaggcaataacagatgctgggaggatgtggagaaagggaaccatcatatattgttggttgaaatataaatagtacagccactatggagaacagtatggagggtcctccaaaaataaaagtagaactagaacttccgtgtgatccagcaattctaccaccgggtatatatccaaaagaaaaaaattagtatatcaaagagatatctgcactcccatgtttattgcaatagtattcacaatagccaagatatggaattaacctaaatgtctgtcaacagataaatggataaagagaatgtggcataaagatatatatatatatatatatacacacacacacacacacacacacaatgtggtactattcagccataaaaaagaatgaaatcctgtcatttgcagcaacatgtatggaactggaggccattttgttaagtgaaataagcgagggaccgaaagacaaacatcacatgttctcatgcaggtgctaaaaaagtagatcctatgaagacagagagtagattagaggttaccagaggccgagaaggggagtgggaagtagaggataaaggaaaaaaacaagaatataaatgtatttattaccattaaactgaacatttaaaaattgtaaagatggtaaattatatatgtgtattttatcttaattaaaattttaaaaatcaggagtttagaaatttttaagagaagtgtgcccatagtgataagaaagaaagacccttttggaaaattttcttgaacaaattatacagtattttcttaaacaaattgtacattctgtagcagttaatacaccaaataagatttcagggttacctcttggagattgtatgaaataaaaacatttaggtgggcatgatggctcattcctgtaatcctaaaactttgggaggctgatgcaggaacaatacttgaggctagtacttcaagacgagcctaggcaacatagtaagacccagtctccacaaaacaaccaaaaaaaatagcaagtgtggtggcacacacctgtagttccagctactcaggaggctgaggcaggaggaacacttgaggccaggaatgtgagactgcagtgggctatgattgtgccacagcactccactccagccttcactgtagaaagagaccctgtctcgaaaggaaggagggagggagggagggagggagggagggagggaatgaaggaaggaaggaaggaaggaaggaaggaaggaaatgtaaactcatttgatttggctgtaaaggattaatagaaaaggaaaacgtagtcactaggctgagaaaaattgaactctattgaattggtataaagatctaagtggaggtgtttggcagacatgatcatgaagctttcactgaggaaggaaactctaggaggcaaaagcagaaatgcaactcatcaaaattgaaatggtgacaaaatatgtgcattcaaacctgaaagtgactgaaagagaagcccaaacacacaattttggggtaagatgggaaaccattaccaaagttctcagaaagagcatttttaaaagtaagattatagaagccaaaaggatatgtagtagtctgttctcacactgctgtaacgaactacctgagactgggtagtttgtaaagaaaagaggttttattgacgctcagttctgcaggccatacaggagacatggctggggaggcctcaggaaacttacagtcatggcggaaggcaaaggggaagccagtacatattacatggtgggaacaggaggaggagagggagggtgggaggtgccactcactttttaaaacaaacagatctccttagaactcactcactatcatgagaacagcaagggggaggtttgctcccatgatgcaattacctgacaccaggcccttcctccaacatgggggattacaattccacatgagatttgggtggggacacaaattcaaaccatatcagaatgttagtgactaaagtaaatgttcttgtttaactctttaatgtgtatattgagtgcaagccatatgcaggggctattctaggtactggtggtttactcaagaaaaagggggcaaaaaaatgaagaaggtggccaggcatggtggcttacgcctgtaatcccaacactttgggagactgagacgtgagaattgcttgagcccaggagtttgagatcagcctggtaacatggcaaatccctgtctctacaaaaaaatgcaaacaaacaaacaaacaaacaaacaaattaatcgggcatggtgtcacatgtctgtagtcccagctacaggttgaggtgggaagatgccttaagcctagggaggttgaggctgcagtcagccatgatagcaccactgcactccagcctgggcaacagagtgagaccccatctgaaaaaaaaagaagtcaaaacaaatgaaaaaaaaaaaaaagtcaaaacaaatattcagtgtaaatgtgagaccatgtaaaaaagtttaaaagtaaaatatatagtttaagcagaggatgggagacggggaaaaaaccttttctccctaactttatatactccctctataaattagtgcttatggccaataagaaatgaataatttcttttttcaccgttggtagtaaagtataatggtagttaacacaaaaaactaaatgatatattcagaacctcatactaaacaaagaaacaaaggcatgcaatcacaggacaggtggaaacagtggttctgaactaaccacaaaccagaactaccaaatgtgctacaaattgtttagtaacaaaggaccatcccttcagaattgaagagcacgtctcagttatctcatgcctatgtgcatggaacttaaagtctcaaaattactcttacaagatggcaaattgaggctgtcagctaagctcctagattgtctgtttctccaagaaaaataaatttcagtaattattaaggaaaaagcatagaattgcatcatgttttacatttcattacttttggcatgacatgggagcatggatgttttctacaaagtgctctgataaattgaagaagaggccaacaacagccaccgaaaaaaccttcaagattcttgccagtatggctcaggggaaaaattccctcataaccacagatttgacttttcaacttctgtacttctgcatatgagtaataatctctgaggttaagtattcatcccatttagctaattgtccacataactccctgggtcttagattgctctataaatacctcctaagagaagaatttttcaaatgacagtttcgtttttcctttttcttcttttaaagcaacaaagaaaagcacgtctgtgtttatatttaaccaaacttaaacttggagagcattggccgtgttgtcgacgtgtttcttttctctactgttaaattccttactgttccagttactcaccatcatactcacctttgcctctgccacttggggtcctctgttctgcagttgtgttctgctctctgatgcctccaggttttgctgcaccttctagaaattgctcacctggataaggccttggctgtcctttatgactcatctcgttcagaagccttttgaatctctcttgaagaatattccctttgctcagtccaaatacacattcactcacttgaatgctgcttcttcctccagtttcacagtgctggggatgatcccgtaaggcctttaaattacattataattagtcatgcacttctctctgctctggggctgtttgaatcgttcactctctttatacctccagtgttcagcacagagcctagggtataatgcgtatgcagtaatgtttcttgaaggagtgaatgggcaagtgaaacaccaaacaaatactaaagagcaaaacatgtattgctcttgtatattaacacattccgagaagagatgggaggaaggtcttgaataatatcaaattatttcttaagagatcttgatttagatttttttcaaaatgagatacatgttgacactgctgtcaacaaataatcacataaaagctagagcctggcttttaagtatcagggggagcatgtgtgaataatcagcattgctgctgttgaagctccataaagtgggaagcagcgactgcaaagatccagagatggacatctgaagcataggaaaggggcagcttgaatgagataggagcaggatctgtattgattgcaggtcaccagatagaattaaaaaaatctatgttctcactagtggctacagttttcaaggacaaatgactattagtggttattgtatttttcttgttttcaatggagcagctccatgacttagttacataagaagttaaaggctccacccccttccctaccaatgtcttaagctgtcctccgtgtgcatacaaactttgtttccagactgccctcgtgtgactcagtccctggaccagcttcccagccccttctgtttccagcacatcctcctccacgtgttacaggattacaaagctttgcacagcctttcaatagggtttagagcaagaatgacagattgctacctggtaggcagcactgactatagttttattggcgttgcgtagagtgactgcatgacatgcaggttgtgcttttgttttgccaggaatttaaaggcatttagcaaagccgtatgaaattatctgccttatgtacctcgaatgtgaggtaatgaacttgtcattagtcgtgttttagtttagtgttctcgctggaatttgcaaaagattaaaattctgcacatttcattaagtcttccacatgggctcaaaataccatcccgcaggctcgacctgacttgccacgttgctttgacaccatctctgattccagtgaacaaaactaagtaagtgtgacttacagccgccctaccaaacattgaaggtgtgagcctgcactgttgttttgtaatgacaatgacaagagtataatgacaagagtataatgacatcctagtccatgaagacatgttttctcttttccctccctctatgtatacttacttactcttaaggaaataatataatttctatttctgcttaaatctgccatctctacttagaattattttcccttgaaaaattaaattgcattatccatcagccaaatggaaaatctgattactaaatgcctacttctagacattatgaattacctgtaatatcacatttcttgggcacttctcagaatgctatgattttacataaaagcataaattacagaatgagaagagtaaagcttagtgcatattatgcaggttcgcagagtgatatgtggcctacgactgtcattgtaatcaaaattgatttttgatcatttataaaactaaaacaactaattgaaagcaaatttactttaactgatgaaattcaagatgaagtgacagtagtcatgaatcacagttctgtagatctgctaaaatgccaatgaactgttattaatggtgaaagtgtttaatatattaatgggaatccaagtaaggaaaataaaacacatattttgcccttaccttaagtcatgttgacatcatacataaatcaggtagaatttgaagatgtttcatccagcattcatcatgaagcaacagagtcaatagcgggcagttacagtctgtaggcaatgctttctggtgtggattatgcaagaaacttacagtcatttggcttcctttattcccctttgcatgtaaactaccaggtggtaggtagacccattcttggctgccagtatttttaccacttggatagattctgctctctgaggtctttaagacaaacacagcacatgtacattgtgatataggagaaagaacatcagacagaggcagagaactgggcttgtcaaaattaagggtgacctagagccttagtgtccttatatgtaagatgagaagcttggattaaaattcattgctccttacacttgatttttatgcagcagaactttcttcaaaagagatcactcctggaatcccaatatacaaaatggataaaagtaggattgttctgaagtaaagaagtaaaatccagagccccacttatttgagtcatctcctaccttttagatggttattaacattgtttctagttcagaaattctgatgttttatattaatttaaactaaagttaaattaggactagaagagccatttcgtgtgaaaatagacatagtctgagtgatttaggcaaacccatagtgacagatttagtggcctgatacactggcttggaaagatctgttccaagtcagtctcaatacacaaggctcggtgaacacatggcgagcagtcttggtggtggtcaagaacatggaatttgctgtgagagagagcttggttagggtctgggctcttccatctgttaactgcaaacttgagcaagttattcaatctccctaatattcagttttctcattcataaaatggattgataatggtaccttctatgtacagttactgtgggtattaaatgaggtaataagcctgtaaaactcctggcatgatgacattggcctacattaattgctcacagagtgagaacttattataaacacaggcatttttgttgaatgactgactgattgaatgaatgaatatagaactagctttctatttgtgatgtatggaatatctctatttcatttaatttcattttgaatattaaaattcaggcttgcttttaaaccaaagtatttgctgatgcaaagaatgaaattctgactatgatacagttacataacttttgaagaaataagaaaaatgctaacacagcatgaacaactttgatttagagaacagagtctctgttaaaatccatgggacttgtcaacttcatatttttgtttatgagcataaaacactctttagtgcatgtcggaatcatttgatgcttgctgaatcacaggttgctggaacccatccccagattctgattcagtctgagatgaggtctgggaatttgcatttttaacttgttgtctggtgatgctgatgctagtggtctgagaatacactttgaggatcactttttcacagtaaaagtcacagtcattaagcaagttaactcaatgagaaatgataatgaaaaggcatgtacctaaatagataaaggacctataccagctatgaatttgagttcagcaataattgtaaaatttgtaattcttttcaggtatttggtttttaaaaaactccctatgtatgcttttatcttatgttttatatggtgtccctcttttcctctctttctctctaatccagtttttaatgtgaacatgtttaatgtgaaaatgttgttcaaagcagaagcgaaccttttgtgtaaccttggcggtattaagtttgtttgtaagctatttctgccctgttagcttctgtactgaaacacgttttcttgcttttgttgcagtatggaagagaagagagcgactggacaattgtgctatcctgaatggaaaatagaggatacaatggaaaatagaggataccaactgtatgctactgggacagactgttgcatttgaattgtgatagatttctttggctacctgtgcataatgtagtttgtagtatcaatgtgttacaagagtgattgtttcttcatgccagagaaaatgaattgcaatcatcaaatggtgtttcataacttggtagtagtaacttaccttaccttacctagaaaaacattaatgtaagccatataacatgggattttcctcaatgattttagtgcctccttttgtacttcactcagatactaaatagtagtttattctttaatataagttacattctgctcctcaaacaaatgcaattttttgtgtgtgtttgaaagctaatttgagaaaatttcataggttacatttcctgcagcctatctttatccacagaaagtgttttcttttttttaaatcaagacttttaaaactggatttcctcccatcactgttttttgaaggtcctccaagtccgtgttaaggtaaatatctgttttcttcctgatgtcacagcctgagcatactctgtgcattaggaagacctgagtgcatttcccaccattgtcctttccacattatgttgtagctggctggctgtcaggcgactacaagactgagggtcttgtgccttatagatctttgtatcccccatggctgacatatagtaggtactcagtaaatggttttataatgaatcagtgaacattttgcttctatagaagtgtaccttctttgtttctatattatgaaacctctttattagaatttgtgattgattctgacagtgtatagatttaccttatattgtctttattttccatgagctactaagtcattagagatactctgaagcatagttagtttaggaaatcacttcatattgattgtattagaattatcttggaattgaagatatatccctagagcaggggaccccaacccccaggccatgggccacacagcaggaagaggtgagtggtgggccattgaggagcttcatctgtatttatggctacttcccatcactcgaattaccacctgaactccacctcttgtcagctcagtggcagcattagattctcataggagcacaaatcctattgtgaactctgcatgcaagggatctaggctatgcgctccttatgagaatctaatgcttgatgacctgaggtgtaacagtttcatcctgaaaccacccttcaccctgcagtctgtggaaaaattgtcttccacaaaactggtccctggtgccaaaaatgttggggaccactgctctagagagaggtcatgatatcataccaaccaaatggaaatgacaaatgttttatgtcaagtgttaattgcagaaataaatcttttttttttttttttggtagaaaacaaagaggcatactctgatttttatactctgtttttgcaggtgctcttttctttgaatggagatttgatgagcaagtggttaggatgcagggagagctactatgggtgatattttccttgtttaggagctgtgagttaaaattgtatcctttgtggtttatctaaggaaagtcaaatcttgacagaaaacatttttccttggaaggtcaactctcagacattgtattttggtttccctcagtcctcataacttccttcttgctgaacatattttattctcttttcagagaaggaaaataaaaaggattctaaaagtttgatgcattggaaaaatttccttgaggcatttagcaacacatagaaaatgggctttgattcttttccaaaacttttagccatagggtcttttatagacagggatagtaaaatgaaaattgagaaatataagatgaaaaggaatgataaaaatatcttttagggggcttttaattggtgatctgaaatcttgggagaagctgttcttttcaggcctgaggtgctcttgactgtcgcctgcgcactgtgtaccccgagcaacattctaagggtgtgctttcgccttggctaactcctttgacctcattcttcatatagtagtctaggaaaaagttgcaggtaatttaaactgtctagtggtacatagtaactaaatttctattcctatgagaaatgagaattatttatttgccatcaacacattttatactttgcatctccaaatttattgtggcgagacttgtccattgtgaaagttagagaacattatgtttgtatcatttctttcataaaacctcaagagcatttttaagcccttttcatcagacccagtgaaaactaaggatagatgtttaaaaactggaggtctcctgataaggagaacacaatccaccattgtcatttaagtaataagacaggaaattgaccttgacgctttcttgttaaatagatttaacaggaacatctgcacatcttttttccttgtgcactatttgtttaattgcagtggattaatacagcaagagtgccacattataactaggcaattatccattcttcaagacttagttattgtcacactaattgatcgtttaaggcataagatggtctagcattaggaacatgtgaagctaatctgctcaaaaagatcaacaaattaatattgttgctgatatttgcataattggctgcaattatttaatgtttaattgggttgatcaaatgagattcagcaattcacaagtgcattaatataaacagaactggtggcacttaaaatgataatgattaacttatattgcatgttctcttcctttcacttttttcagtttctacatttcagaccgagcttgtcagcttttttgaaaacacatcagtagaaaccaagattttaaaatgaagtgtcaagacaaaggcaaaacctgagcagttcctaaaaagatttgctgttagaaattttctttgtggcagtcatttattaaggattcaactcgtgatacaccaaaagaagagttgacttcagagatgtgttccatgctctctagcacaggaatgaataaatttataacacctgctttagcctttgttttcaaaagcacaaaggaaaagtgaaagggaaagagaaacaagtgactgagaagtcttgttaaggaatcaggttttttctacctggtaaacattctctattcttttctcaaaagattgctgtaagaaaaaatgtaagacaaaaaaaaaaaaaaaaaacaaacagaggcagaggcaggcagtagcaagaaagcagagcgtaacatcagctagatggtaacatgcaatgtcagctctcttgaagacatgggaaacctaagttacaccttgggttaaaattcttcaccatattagttttgttgcttcataaaatttacctaagcaagtggtcttgcttgcctcaaatccaagcagtcttgaacacttggaggcaattaatgagtatatcttagtcaaaagaattgttggagctttttattaaagctacagtttcagttctgcttttggggaattgtgctatgaaagcagctgccaaaataagctcatttattttcttcaatcccactcagtgctcagtcactatattctgtttcctttttttttttcaagttgcatatttggtttccccttatgattgggaaagatgaattttcagcagaaaacattgtttgttcactttcaaagagtgatagtttctaaaacatttagagcaataaatattcatcagaggtaccaagtaagccggcagaagagttaagggttagagaaatcccttatttcatgtcttgactctaaaattatcaaagtacttttccttgtaatgtggatttcttcttatgcggatatgcaaaaacttcagttatacgtagtaatgctagcaggtaattttagtagacattttataacaactgtcactttgtttcgccacatgtagagtttgttcagctattttccagatatctccccacaaaaggaggcaaagggtaccagcttttcaatgagcattacctattacttggcaaagatgatgaagactctattaatagttcatttgataaatgttgacataaccaacaatagagattaggaagttagttttaagaaatcaatggcatatagacattaccctcatggagtttgtattctactacttgaactgattgtagctataaaagcatagttagatagctgaatagttagatcataagcaaagaaggccagaacacatctcttatcaagaaatcaatgaatagtttatctcatttttaaagcaactttatccttctttaattccttcctttcttctagtgcaaaactacttaataaggttggtgtttaggttagtgttcacaccattcctcatctggtgtgaattaccttctctttctttactatttactaccaacctagtacatgtgttgactgaattcttttcaaacaatgttgagttatcatggtgcacctaataaattaacaccacagattacagcatccttgctgattttctcagcaaagccagattagatggaaataaacaaagaaaatgatcctagagtgaatttttctagaaaatatctattatgaaccatgctgtttaaagtattagcttgaaggtgatggatccagctattcagaaaataactttcatataaccatgattttgcacagtatgaggtcttaaatgtgtggaaagagataaattttttatcattaccacaaaccccttttaaagattcaaaggtggaagaaagtgatttattttttctcttcagcatacatatataaaagacttgtcagatgtttaatttggggaggttgataatgaaacatatcaacagagtatagtagttatagtagtgtttgtgggtaaataatttcctggggtcagacatatataaacatatttgcttcaaaatgataaaggcatgaaatcagtcttaaaaattgaaatgggggtgatgggggagaaaaagaagaacaaatttgaagtgccctttcaaatctgctggatacaagtattgaagttttaagtcatcttattctgtctgaaagtgtatttttcattctacaatagacccaatcaacaagacgtataacttgagttgcatgatgttcagtttatgtaatctactgttgggatggtaagaattgatgtaggctgtggtgtaagaatgaattaaaatatagtttcactggcttttctctacatatccactatcacaatggctaggtttcctgttgctcactattggattctggagaaaaatttaatgaaagatgatatcagaggaagaataagtggaggtagagaagaaaggaatgatagaggaggggaaaaaaacaaaacatatttttgtgttatccaaaggagctttttccttattctgtcaagcattgagatcttcttcagctttcaatgtagttgctaaatacaaataatgctactaggtagtgactaaatatagcaaacacttcatcagatattagaattaggtcacactattgaggttataatctgaaggttgtgttacatagaaaccactttagattattatcaacttggactaggctttattttataatagcatagtaagtaatatctattgtgtcatttcttcaaccattttattctaagatccatgaagcttcttgaggccaaataaaataataagtttagacaagaagtagattgtgacttttttcccttagagatactatttactatctcctatcctgataggtggaaggtttactgaattggaaattggttgactattagtttttaactaaaatgtgcaataacacattgcagtttcctcaaactagtttcctatgatcattaaactcattctcagggttaagaaaggaatgtaaatttctgcctcaatttgtacttcatcaataagtttttgaagagtgcagatttttagtcaggtcttaaaaataaactcacaaatctggatgcatttctaaattctgcaaatgtttcctggggtgacttaacaaggaataatcccacaatatacctagctacctaatacatggagctggggctcaacccactgtttttaaggatttgcgcttacttgtggctgaggaaaaataagtagttcgaggaagtagtttttaaatgtgagcttatagatagaaacagaatatcaacttaattatgaaattgttagaacctgttctcttgtatctgaatctgattgcaattactattgtactgatagactccagccattgcaagtctcagatatcttagctgtgtagtgattcttgaaattctttttaagaaaaattgagtagaaagaaataaaccctttgtaaatgaggcttggcttttgtgaaagatcatccgcaggctatgttaaaaggattttagctcactaaaagtgtaataatggaaatgtggaaaatatcgtaggtaaaggaaactacctcatgctctgaaggttttgtagaagcacaattaaacatctaaaatggctttgttacaccagagccatctggtgtgaagaactctatatttgtatgttgagagggcatggaataattgtattttgctggcaatagacacattctttattatttgcagattcctcatcaaatctgtaattatgcacagtttctgttatcaataaaacaaaagaatcctgtttgtgtggtttcatgaaatcagcattgttgaatgcatgaagtaataatgctaaattaacatttttatgatgtctcaaggtttctggtcaagggaagtaaatgtaggatagtatttttacaccaaaatgacacagagagaattgagcacaccagaaagaccagaaaccacaccactggatagagattcaatatgtttctttttcaaacatttggacaagaaaaaaatgggcatttaaaaattcttccttcccctggttatggatttatctgtagtaaaacttagctttgtcgtttgagatttgcacagaatggggggagtagattacctcttcccattcattgtcataatggatctacatcactgataaacaccatacttctatatgtggttaactagctttagaataaaagacactttaaaaagtaaaaggcctagagatcttcaatgaagtgtcccttttagccaaaccaggccttgcagaaattgtcctcaaaagcaccaagggagaacaaagccaagtgcagaattacccaagggtcacacattttgtattcattttcttataatttgcccaaatgatttgaagtacagcaaaacctgaagttttgcaaagagttactgtaaactgaacttaaaaatgtcagagtgctcggtgacccacttctccagaccctgtcaacctgtgaaaatattggcctttattcagatctctcaagaagttacgcgcagagtttggaaggtctaggcaaaggttattagtcaagtgttcttacagtgtcaacgctcaattcccacaagcgtgagaaagagagacctgtcattcctgagggtgatgacatacatttactggagcttatataatttatcagataagacagcagtttccttcagggtagaaagtgtgttttctacattgatttagtacaaaacaaaaagaaaaggggatatttcaaattttataattatttttctgctaagctgattcagtgtgatttaagcatatttttcaaatcatgaatctgattccatatacatatgtgccttatattgtgataatttatttttaagtgaaatatgctatcatagcctgactttatgtatagtggtgacaacttgcaggatcgcatttctgtaaccaaacggccgacagctgaggtgtagatgcttcctatggtctgtagaataatcactgggcttgttctctagctatgtctgtatgcaatcgcgacagtgttgatcaaaacccatgatcattctctccaaaggtctttgtcactaagccactagggattctgaaaagttcgtgagctgaaacaaataaattgagttggaagatt

SEQ ID NO: 120 - DNA, 978 bp, Homo sapiens
accatccttctgcctccaaaatctcctgaacttttttcctaggtgaataaccctgttattccccaagttgcccaaaccaaaaatccaagagtctctgttatttctactcccttaaatccacaaagtcgctatcatttctaggtcctaaataccttgtatctgtctcctcctccccagcctcctgctctgccctttaggcatgtattgtctctgtctggtagtattacagtcacttcccaactctttctcctgctccatttctgcctctgtcttctcttcaaaaacaaaaacaaaaaaacatggcttccagagtgagctttaaaaaatgtgcttctcctcacatcactcccctgatgaaaaccctcatcaaacaaggaaatacattgcagcttgagcctcttctaccttcctgggccaaagcagacattgctaatcaatcactgcattgcgtcctgcaaggcaggatttggactcagctttgctatgagttcattgggttgacaagagagatgagaactatttgacatctcaggatccttcctcatctgccctctgcctgccagccttgttcctgctgctcctcctcccttacctgcattgtagaattcacctcccagccgtcctgagctcaggggagttctgagtgactcataccaccatacctttgcacatgcagttgcctctgtgtggaatgcccttccccaagtgtgtctgcctggaaaacttttactttactcaggtgccatcctgtccatgaagtctcgagatttaggtatttttctccaagcccccattgccccatgaccaggtgttcattttagggagcacccccttgcactgacgttgttggttagcatgtctgagacagagataaggcttatgcgtcttcacacccctggtacctgccatggctccactgtgctcaggagctgtttgtaaacaatcaaatgggtgatggaataaatagcatctgtctta

SEQ ID NO: 121 - DNA, 28890 bp, Homo sapiens
agtgaggagtcagccgggcagccagccagcgagccagccagccagccagccagccagccagccaaccagccagccagcgggccacccagcggccgctgcagccgccgccgccgcacaagggcagacgcgctgcggtgcggggctcgggccggggcgctcggtgccctagctcctcgccgcgccagccgcctcgcaggtaggagcgtggctgtggctgggctcaaccgcctcccggggatggggctgatcgggaccagacccgaccgctgcggggatggggtgtgtgttcgagtgcggtggcggaacggctgggcgaagttgtgcctcgtaaagtggaccgttgtccgctcccctggggcgcagggccccgggcttatggggtgctctcgcgcccccaaagccaggactgagctccctcaggggtatgtggcgaggggcggggaggaggaggctgagacttgagggaggagacagcgatgcaagagggaataggaccgtcccgccgaccaccgaagggggcatcagagaccctcggagaaaccaagcccagggaggagcttggaaggcaaggagaaggtgaagggctttgtgtgcagctgtggaccttgacggactgcgctccccttgccttgtctgttcgtgcctccagccccactggggctaagggagggtggggggctccgagaagggcaggagagaggcggcaggtcatcttgggtcctagtgaatgaaatgtgtgcctcccttttcctctcttctccattctagcccactcaaatgagcggctttggggctgccatcagaccgggcaaatgacacaataaggacgggtgggtggagagatgggcagcagctcgcagcccaagaggggtggccgtctagccccgggaggcattccaaccacacgtgtccatgtaggtaggtggtggggtggtgggcaaagctggaacctgcacctcgcggggatgccgaggctcaggattgtgcatggaggcacgggtgaggcgcgtgttgggaggagtgggtgagtaaaaggttgagggggagcagcgacacagaggcgctgagtgtaccttatggccaatgtacattatggccatgcatcgggaactgactaccacttcctctgggactttccacgattttcctttttcctaaccgcctcccccaaccgcccccgccctgcctcccccacaggagtgaatcacccaccccttactacatgaaccctgggctgaattgaagttggtgatgtatccctgtccttgtagtgggcatgtttgtccttaacctgtaggatgacaccaatactccgcatcccctactgcgttaccctcctccctcaagactgagcgtctggtaaatgcggttggataatggctagcgagttaaatgtctttgagtagctgtggtggatgagtgggcaactttgaatacagtccaagtgtgactgttgtaactgaactcagcatgcctaaggggccacactcactatctctcctttctcccctcacctgattttttgttgatgcccccaactgtttaccttcttctctcaacaagccaacatgtggatattatttaatgtggaatacgtttgaggaaccaaatgaacctttaagaatgccacttatatggccaggcaggagtatgcaaggctcatggtcgaaagaatgatgctgtaggacatggagagagccctgagcctgatataaatggctttcgaggtgaaacaaaacatttcttccttagcttctttgggagagatgaggcatttgaactgagataaagaatggaatcgagaaaaaaaaccgagttgtttaggatgaggccatgaggataatgaagtgaagggaagaggctctgtgaatttagatgatttctagttagaacatattggccgtgtgtgtgtgtgtgtgtgtgtgtgtgtgtgtgtgtgtgtgttggaagtgggggttgttgttaagggaaagttgatgtcaaaagttcagccatgcccaacagagaataagatggcatcctattgaacaagatcataaatatgaagtcaggctgccctttacattacacaaaggaacacatagatggcttttcagaactactgggatagaggggtaaatggatgctagtcagacagaagaaccggctggattgatgcggctggattgaagtggtaaatagtgacctcacatcagcagcatgactaaggctcatggagttgcatcacatttcctctccctcccccaccaaaactctttgaatttcctcagaatctacattttttgcctaattactagtgtcctgtgaagggaaggagaaagggtaaaggttggttgtaaggatgataaactaaggcaagaaggagcttgtctgcttatgtagaaagaaaaaaatagctacagtgtcagtaagaggtctggagcttgaacctatgtcagtaccatatgggcttttctttgtatctaagattctacttcttttttcttttctttcacctgccccttaacaggtttctcagtaccacacactatgtagagttaatataatcaacaaaagtaactccttactttgggatttaaaattcttcacaattcagtgcctacctacccctctcctttactggacctgtgccaccccaatttacctacccatccttcgagcaaatagctccccagtccttgaagatgcaacagacattcttctacctccgtgactgtccggttgaaccccatgcttgctggacatccctgtacctgtccctaattatttttgtacatatcctggcccagctgattagctcccttacagaactcttcccaaactttacagtcaaaattaatcttaccccttggtaatttgtattatttcaatgacacctgctttaggtgttaatatctaacaagtgcccaaaggatgtttgatttgaaaacatgaataaatcaaagaaggagtgaaaggataaaaaaaatcttaattatcttgccttttctttagaaaatgggatggagcctttctcatagacctgtgatgattcattgcaattgtgaaaataaagcacctaggacatgtcagactgaggcttttccttttgctcctgggttaagagaccctaaaagtacctatcacagtgtctagtacaaggacattcacaaaaagtttgttgaataagttatttgccagcctacattttaaactctcaggcagaatatggagtggattaatcccaagcaaataatcaacaatttttgtcattgtcctagactgaagaaggtaactgtttccattcaattatgaaggtgcaaagtgctcattggaaaagcagcactacgaagactgtcctgctatagccagacatttaccatgccatttttatttttatagcccaagcaatctatgaggattaaaatgtagcatatagaaatagaaaacaaatcagactttcaaattttccccaaagacactacaatttagtagtccctcacttatctcgaactgggcaatttttcatgcttctttttatgtgattacaataatagtcgccacttattgaacatctgtatatcagctactaaactaggtgatttacatgtctaatctgatgacttatttaatctgatgacttacatattgttatctccattctaaaaatgaggaaactagggcttggagagaagctaagaagcttgcctggagtcccagattctgaactgagtgtagactggaatttacgtctgctgactgtcaagcctgttcagaatttgctttccatgggagaaaactgacagttctttattccttcttctcctgaagtcctccacttcccagatttcctaccagtaatgttgtgcttctaaaagcatcctcatggatcttattctgagaagtactgttttcttcatagatctgttatttttatgtccttaaactctaatgaccatcagttggaaaggccaggttcagaacccctaataagacctttgggtaaagaactgtgtgtgtttggaattcttttcttttttctcccagtctgtctgaattcctcttgccaggccaagtctcacttcttttgggtagcctttttcaactacaccaggccaccctcagcctctcccctaatctcttgcattgtttgaaattctgcagttcaatgttttcttaatgaaagtagacttgagtgggttcccacacgtgacagggactttatgtccagaacacaacctggcatatggtagactttcagaaactgagttaatgatgaattggtaatgactaaaatgcagaaatggaggcacgaaatattatttgcatgttgatagtttgcttatattgtagaagagggatagaaagagaggataattattttcttagttaattttcacccttttcatgtaacttccaaaagaggaaagtaccttctggaaatatgccagagcagaccactgtaagctgagttttctgagcttaactaacactggcactgaatgattatagtgtttaataatttcgggtagtggggtggggcattgtttagtacctttccctttgctgtcatgccaaatctctcagatgtcatgcacatctgagaaaatcagaggggtttcactggctgcacttattgggggagaagaaggctggggagaggaaggaagataattcattctgttttcatcagagcagcaagatttgtgtggggtatagatttggcattcattacatcatgtattgataagggatggttaaaagatcagtagcttctcgtctttgggtggaagagagtttcacctatcactagattgaacacatttccttaggttgactaaaccttctttttctctgacctcaagggtgcagagaactttgaaagccctggtataaacacagtgtgctatgggttgttagaagcacattagtcatgttaaaggagaataggagagttcttgggatcactgaatctattcagcaagtcatgttctgtgcatccataggccagcaacagtgttccagcaggtgtgtgagagggtcacatgcgatacttcagatttctccttcctgtggaggctaaatttgctatgggtagttaaaaggaaagggcctactttttattcagagagttacttcagatatacatggtcttctgagaagtttatcaggatcttaccataattataaaacaggaataaactttctgggttttatttgctaagaaatgttttgctttggctcatcatctcagagctatttcatgtgcttagcacatctttgatgcttgatgaagtttagcagggcactataggaagacttttccagttgttgaaattttttgtcccccatacctggaagcctttgtgaatttcaaagaatcactttatttttgttttgctagttttgaaaatcttcaggcaggtattgacaatgatttctgataatagaaggtggtttagaaagtagaggtggtttagaaggtatttagaaatagaaggtagaatagaaatttcattagaatgtaatctttacaacagagaatctagaataatgggtagtgcatggtaagtgtttgataaatatttgttgaatgaatgtgtttttttatttcattttaatttgttcctaaaatgatggcacagacaattttttacaatgaggtgtgggtaaggttgtatgcttataaattatataagctggggaagatagcttacatatatgtacattatgtacatatatatataaaatttcaaaaatattttagagcagttttaggttcacagcaaaattgagaaagtagagttcctgtctgcctccggccctcacacatgtacagcctccccccctctcagcatcctgctccagagtgatacatttggtacaacttatgaacctatattgatacatcattatcacccaaaatcaataatttactttaggattcactcttggtgtacattctatggttttgacgaatgtataatgacgggtatctaccattatagtatagtgcagaatagtttcactgtcctagacatcttctgtgctgcacttatttatccttcccttcccctaacttctggcaaccactgatctttttactgtctccatagtttgccttttacagattgtcatatggttggaatcatacagtatgtgaccttttcatattggcttctatcatttagtagtatacgttttaaggtttctccatgttttttcacgccttgatagctaatttgatgttgtcgtgttttggattttggccattctaatgagcgagtagtggcatcttgttttaacttgaaattctcaaatgacattgatgtttgtattagttcattctcatgctgctatgaagaaatacccaaaacaggtaatttataaggaaaagaggtttaattgactcacagttctgcatggctggggaggccttgggaaacttacaatcatggcagaaggtgaagcaaacatgtccttcttcacatggcagcagaagagagaagtgccgagcaaagggggaaaagctccttataaaaccatcagatcttctgagaactctcactatcatgagaacagcctgagggtaactgcccccatgattcaattacctcccatctggtcccttccatgacacgaggggattacgggaactacaattcaagatgagatttgggtggggacgcagccaaaccgtatcagtgttaaaaatcttttcatgtgcctatttgccatctgcatattttctttggtgaggtgtctgttcagatcttttgcccatttttaattgggttttaagagttctttctatatcttggttaacagccttttatcatatatatttttttgcaaacattttctccccacctgtgactctttttcttgttattttttttagtatatgagctttccccatcttttccttttttagggggggatgtgtgccagatttaatttaatataaaactagtttactccagaactgagaaaccaaaatgtgaaattaactggaagacacactccccttttaccaccccccttataacaataagcatcagttgaatttaaccagactgcagccacagcctacactagtctggggggcagttgccacaggacatcttttgtttctgtttctctacttcctaatatgtgcttgtgtttattgattgaataggtggtgtggtaagtattcctggtcaacacttcctgtatggcatgtaatctttactaactttcttaagagccttcatttgtttcccagcctaattctggacctttagggaaagggttttctaggctgatgattctatgtaggtgagaagagaaatcaagaaatccatgcctttcttgttgtagtaagaaaaacaaaacaaaacatgaaactcttgaaaactgccagagaataaaactttagtctgaatagccactcttaatgttaaatgcaaatctccccggtatttgaatgcactccctgccctgccttacccagcaacttctttagtctcataattactttgaagattaaatgttggtctttcttcattcgtcatttaatttctgtgactgctagtcccaattttccttgggtgggagagaagtagttgtcctgtcatagtgggacagtctggtagcattccccacaatgaacataaacagcactgtgccacctctgtttgcacagctgaatcaagggttaaacccttggagtggagggaggacccacacaggggcatttgatacaaacaaagcatgctggcatttgggccaagagatgtagaattcttttttgagaatggtctgcctaacttttgaggctaattgccatttcctgtcatggctacctatttagcagggtaattaagcatgtttggctcctggtgctaacaggttattggatccagttgggagagttaggttgtctctatgactctaccttacctgatgtgattttgccaaatcactagatttcctagtctttttaggtcttccttttgagaccgaggggaagaaataattactcctgattttatccatttcaagaactatttgaaggtccattgtgtgagggaattatcaaagtgaataaaatgtttgttcccataaggaacttacagttgggaggtggtaggagaaaaaggagagccaaaaataagatatgaattattgtaagtatgattctatttaaaaaactaatattaggcagaataagaaaaagtatcttaagtcatacaaagtgaaaaaataataataattctatctgagcacttactatccctataaggtaggttcagttgttctctccattttatagatgaagaaaactaaggccaaaagaggttgaacaatttgcttaaggctaacagctagactggattcacacaggtcgtatggctccagaatcttgtttggtttttggtttttttgagacaggatcttgctctgtcacccaggctgaagtccagtggtgtgaataccttctgggcacaagcaatcctcccacctcagccctccaagtggctgggattacatgtgtatgccaccacttctggcttttttttttttttttggagagacagggttttgccctgctgcccaggctgatcttgcactcccgagcttaagcgatccactggctttggcccccaaaagtgctgggattacaggcgtgagccactatgcctggccagaatctgagcttttaaccattacaggtgctgctgcctccggaaaaggacagactgtaacccatgctttgaggacgaaaagcatctcaggaagggaaaacagggtgccttctggggaatttaaagcaacccttttgggctggggttaggggacagaggttaagatgaggtaagagagccttaggctacattgttaatgacttggagtctgtgcttatatgaccaagtcacttaggggtttctgagcagaataataaagtgacaacattttaagattgatgcagtagtgacatgtaggtgcatgttaactagtaagagtgtgtactgcagtgatagtggcaactgaaaaaaagagaaaagtgaaaagaacatggcaactgatttgattgaaaggggtgagggatgggtcaaagttgagtccatggttttgagcttctgagtaagaacaaagacggctttaacagaaatggacactgccaggaggagctgatttgtagcaaagattcaagaaaggaactaatacttgtttttaaatctgacatgggccagatacaatacaaatggaaattcattgagtctttatagcatcctttcaaggtagcttgttttcccctattgtgtagatgattaaactaagactcgaagaggtgaaatagctgtcccggggcacaccatatgtcagtggcagacttctactttaacccgtgctgttgactccttcgcatgtgcttttcctgtttctgctgcctcctgtcccttgtcacatgggacatgcgggacagcacctcaggactggaagggacattcagcctcctcagttgtaatgcttggggcatcatgagaaatgtggatctggagtgcaggtcaggggttgggtgagaggttcaaatttgtgaggtctttggatagaagagctgtataaagctacaggaagaggcaaaaccgttgagggagagggagaagaaatgtaaaaaagacccttgaaggctgacctattttaggagttaagaagaggagacagggtggtcagtgaagtatgaggaggactaggacagtgcaatattgtgggtgctaagcaaagagaatttccaaggagagtgtctcaacaagatttctgggccatttactgaactcctattaaatgccaagcactttacagtgttgatggtgagatcaaagcagaagaggagaccacggcatgtggaaggtagaaatacatagctgataattgatgtgggtctggatcactaactaaatgttagcaattaacactgtctgctgaggttgtcccatctggaagcccgagttcactgggaaactgtgagagtgtggtggtgatgttaagtttttaactagggctcactagcacttattcctccttttcccaatagcctgtaagatttatttggccaaaaaatggcattgcaggagaaaatataatatagtttgataattggttttagtaatttaaaaatgatactgcagaatgaggcagtctccccttttaatgagtttcatagtttgaatagaaaaatgtctttaaagatttttttaaatggtataaccagtactattgaggcttcatggtcttcccctctcctttctctctctcttttctctctctctctctctgtctctttctctctctctctctcacacatacacacacacagacgatgacttttttcaaatagtatacaaaggactcagtattattcagtgtttactctaacactccattaactcaatgctaattcaaacaactgctttttttttctagccaacaagatgttctgtttttctctagtaaaaacagcagagaatccaaaacctgttaagtcagccatcacttctgaggatcacatgaagttaagtttgaagaacattttctatgtttttttctagaggaaaaataactgaaactacaataggaaaaaaattatcaggagtcaggaagaaaacaagaaaaatgcagttcagtgaaatgttgtcactaaagccagagcactaaactcatgaatatgacagagcgggttgggagaatgtggtgcaagggagattgtacctaaaaggaatccagtaatctgaagggtggccccatcctctaccaacttgacacctttgtgaattcaagttatgagatttgctcattatctgtggatacattctctacagcaaaatgtacttggagtggtgctgtccctgccaccgggcccacatctatacaacttcccatatggggactgcaaagctgttaaagctcaggttggagctaagaaactgtatttgtagtaatgggtcacattggatgaactgagtccttgatcccatggtgcagttaatatgaactaggcctccctatgttgcagttttgtgtaactctcagaatgcccttctttatctgggtatttgcatgttattctttgcaggcaagataactttgctaacactttgaagatttgttaggaaagagttgatgactttgtccagattgtaattctttttcctttgagaggagaaggattaaataacaaagcattttgtgtactgggtaggttatggtttgattaatgtgattttactcactgcccaagtaagcagctgataggagccataaacctggggtcaagcttataaattagatacgtccaagagaggcagggtgttacagtcttgaggaacaacttccctccctcttagtgcacctgtcacataatgtgagtggctaggaagtgaagagcaggtgaactaatgatgctgggagacccaaatcacaagtgtgaattagccaagcaccaaaggttatgttggattgagtagcaaggggagattgaaaccaaggttaatatgccagtgatttaggctcgtgtctgcccttaactggtgtgttcatgggcaatttacttaacctttcttggtctccattgcctgactcatctgtaaaatagggtgttaggtgagatcaccaaagtggtgatctcaggcaggttccatttgctaggtccctcgctctccatatgtgtttgaaatttactgatatttttgtctgtgctactccctgcttttggacttactgccattatcttctcttttccaccagcacgccaaaagatcttgtggcatatagtggtgaaactgctcttatcccccttacccaaaaccactctgtatcatttttgaattgttatgataaggaaatgtatcatgagtcctttgtaatagtggtttataacagggtttttgttttcgttccacggatcctttcagagtccaagaaaaagctatgggccttctcatcaggagaaagtgtctacagacacatttccgtatggttgcagggagttcacggattctgaaggccctcaggctaagaactcatgctcaagaaaaataccattactctatttgcaagtttgtgtagtactgttgctctctttgggaaatgctaggaactaaaggtaaggaacccagactgaacctgatgaatgacttagtaacgtgatgttcaagttatgaatgagtcccagacacgcaagcctccttcttgagatagatgcatcacttcctggaggaaagctgtgtcctgtgactgggtgtgtgcatcctagatttactgtgcaccattggctgaaacagaaaatatctgtgagctttcagttctcatgtaaagtaggagcataatatcttctagttgctctcttcgtagtgtgatatgaagcaatttgactggcatcctcagagtttctctgagcactgtctgacaacactatctaaatttaaaagttctcagtttgggctagtaaagtactgttcctgtcagagttcatctcatggagatcacattttcataaatcactactgtgttatcttccttttcatctgtacatgatcttccatttttcatccccttagaaggtgattctagggaggaccaataattgatgtacttaatctactggacactcacatcctttcattagtttgtctgtcctggggataaagcattcccctaatagaattgtcacaactaggacccctaatccagtttattccttcttggtttggagtgtagagttgctgcattaatggtggaaataaacaagttctggtgggcaggatcattttttagttgtttggaaatataaaagtagatgaaaatggaaacagaatctgattctattttgaacataacagctattcctttatctcatttttaaaaagagcaaaaagcatcaaacttaagtttctattagtatctttgctccactgccccttctcccacttcccatgagctctgttcagtattaagccttgtaaccactcttgttctggcatgatttataaaagcaggctattccttttatggaaatcactgatattttattatgttctggccaaaacttaaatgaacataaataacccaaaatttcagaaaaaaatataattatccatttcaaaactttttataagctttctagtaaatatataaaagtagataaagtagtgtaataagcctatatataccaccatccagcttcaacagtggtcaatatatgaccaatattgtttcatctgtaccccagccccttcccctttgtccgggagttatgttgaagcaaattctagacatatcatttcacttgtaaatatttcattatatatctcttaaagatataagaactctttgtacacttaatctcagtaccaacacctgacaaaatgaagttccttgatatcaaatatctaattagtattcacagttcctccgttgtcttataatttgtttctgtaatttgtaagtttgagttggcattcaaataaggtcagtatattggggttggttgatattgtttatgttttttgacctacaggtctctctactttcccctttctttgccatttttgtcactgttgcattgttattgaagaaagtggatcatgtgtgttacattctttcctatgatctggtttttgctgataatctgttatttttaaggaaataagagtaacaggtatgtaattatttcaaacctgtttttaagtgtatgcaaatgttttacttcatgctgaaaactagctgtggaagttaacacttaattaggcaggaaaattcaggcatcaggtgacttctttacatttttattcctgttttttctttttggaagatatcttggcagattatagggagaggtgtcacttacccactgctgaaatgcactgggctggaacacgccagccattcttcatcaacaacaccaaacagttattttgggcaaagaattagaagagcggttgttttgttgttgttgaatatacagtgggaagctggggtgattgaatgtgtgcctcaagtcctttggccccaacacccctctctccttatttgctatgataagcattctcttgagggctattcattacagtggaaatatgatcacagaatcatctgggttggaaaagacttcctgaggtcacctggccccatctggcaacgttaatatgggattccagcatcaactttcccagaacaaggctgtctgttaacaactcacatagctcacataaacccctggtgcagtcttaacctgttttctcttttgtccttcagtgaaatagatgattaaattgcatgtctttctgctgtaggagtgttacacaactaggaccccaatccagataacacacacatgtggctgtgtagatctttaagattaatcttgatttttccctgccatcctctatagcacatataccctgagactctattcaactatctgtatgtagtaatgattttcatgaaaaatgtttaaatgcgtaaatatgatgcaattactgcagactacacctttaagctacagtatgtatgatggttaattttatgtgtcaatttggctgggccacagaatgccaagatttgtggtcaaacattattctgggtgttttgtgagtatgttttttagatgaggataacatataaatcagtggacttcgagtacattgcccaccataatgtgggtgggcctcatccaatcagctgaaacctgaatagaacaaacagactgatcttcagaggaatcttctgcatctgctctcttgggtctccagcctgtcagctgaccctacagattttggacttgccagaccccataatggcatgagccagttctttatgataaatcaatctctctctctctctctctctatacacacacacacacacacacacacacacacacacacatcctattggttctcttaggaggaccctgattaatcagtgtgcaaaaacaaaaagaaaagacaagtatatgtcctcaatttatctggctattttttgaagatgtgttttatattaaagagatgcaaagatcactggagacaccatccgcaaaattgagagtctggccacaactcttctagtaaaacctgactttcagtcactttccctttctagccttagtttcatctctgtaaaagaaggttaaacgaagggatttccaaggtctgtgatttcctgaaatgcaaacatggaacatttgagccagctgctgagaaagtgtctagagataataattctgagggctgcccaaagtttctcttactaaacaaaacaactgagggtgtaaaacagtagtggtggtggagcacagggaataaaaaaccatcaacagaaggatttcctgtatataaggaaaatatacaggaaaatggatcaccctgatttatgtcgcggaagattctaatcagttaaatgtaaaatatggatagtaaatgccaacgggaaaacctgtagcttttgtgacttctcagctgagggcagatagtctaactttgagggcacttaggatctgtgtctgcgttgcactaattcttatttcgtgcaggaggaatagggtggtggtggaggattggcatttgtgataagctgaggctgtcaagccaaactgaggggccctagcccaaccgatggacaggaaatgtctgaccccaagggcatttgtgctattcctgatcacagagattggaaggagcctcaaactggtgctgacccatggggatgtaggttggtttctctgttgccttggttttgagcctttttgtttttccaccttgggcttccctctccaggtaaaaaaagcagtaaccacaaggcagaaaccatattattttagctcctcttgtctggagagcgggcaacacttaggtgcagtaatcttttggctgtccctgtctggaattaatgttcaccctcacgcagcagtctgccacttgggtggctggcattttgggttgggcagtctgggtttgtgcctggccaagccagctgaggggaagttcgcctgccacgtttggttgtggacacattctgtgtaaggtgcttaccccttgctcagtagaggcatcccctgcaaatatggcgaggtggctttctttgccctttgggttccttttgaccataaacttagcagtgaggaggcaggaccttgatggtcatatcccccgagaggctagctgactttttacccagttggtgctgaagatggacaaatgattaaccccctggaatctctggttagaccccagttgtggtcatgagttcagccttttgaaccgcaggctgaaattgtttttccagcgctctacccaatcgggtgtccccgcctggactctgctatggaagcgctcccttgggaaatagtggtgggcaggggggcgtgggaagaggagggaggaagcctccagctgctgctggccggccctgcgttcctctgaggaggtagggaagggaccctcgagatgagtgggagacaggaaaggagctgcagtctggaggcccgagtgggagccgctcctggcccgccgcccgccgggccgcttccttcccctgacatgacagccctgccggcctggctccccgccacctggcagcggccgccgcggcacatgactcctccgccctctgccctgggggctggcggggcccaggcggggcccaagcggggcccaagcgggggctgggagtgatctgctctggaactggccgtccctgctggtcggggctgccaggtgcggcccgcgctgcttcgctgggaactggccttcctcttccagtcctaacgcgcttggccatttgtcccttctaggagccagcggaggggaacacctgctgtctctacctgagagagacgccgcctggggttcaccttccctggcctcagtgttctttacacgtcaaacgggtcaccctgatttacctctcagttactggagtcaaaggagatggacccgctgcagtgcataggaaggtgcttaggtccgctccaaggagacaccgcctccgcggtgccatccacgccaggggccgcgtgacagcttggggtccgcgcagaaggctgcctcagcgaggcggcagctgcgcccctgctttatcttttagaggctgggagacttggtgctatttctggccttggtttctatgtaaaatccaggttggtgggggagttgtgtacactcctctgccctaacctcttcataggaagttaggttaaatccacaaagtggtggggaccttgttcaatagggatagatttcacaggtagccccaaagtgggggatttggcgaatgtgccaataaacttggtttaaattctaattctggctctgctactggcttcagttaccctccccgatcttcccacctcattccctcccttcctcttttttttttgagatggggtcttgccctgtttctcaggctggagtgcgggggaaggtggggtcagtcttggctcactgcagcctggaactcctgggctccagtgatcctcctgcctcagcctcccaagtagctgggactaaagacatgtgccaccacacccagctattttgtaaaaagtttttgtagagaagggatcttgctctgttgcccaggctggagtctttttctctttttagagacactttatcacattcacctctgctctgtagcagtgtcttcaaagtgatctttctttcaagtggggttgagtttgtctagaaggctcttgagcattttcccagtgatagggtgataggccttacttttttgaaattggggtaggggaaagagacatgaaaatatcacaagttctagaaaccaggatttgagcagtcttgttgaagttgcccaatcccaccttgaagtgatctgcatccaagaaaaaggttttgtgatggtggtggtggaatgtttggggattaagagtttgctgtgtggattaacaagctggagctggaaatgtctaatgaaactgacaatgatgccttcctggatcaactcacctgtgtgtcacatgacaagcttgaagaggactcaggaacattcaaacccaaccttctcatggaacggaagcccgaagggggcaaatgcttaaagtcacacagcacaatggttgtgttggccaaaaaccagagttgtctccctcagtgattacaaccagatgtagaattagttttgtatgcccaccactctattgcttttcccccttaaacttctattccttcttattgggggaaggagagctcccttacagatggtgtacgttagggtttactgaaccaggcacccacaccctatttagctttagacctatactctgtttacaggatgggcaatcagcagctgaaaactaattgaatttggaattaaacctttctccctctacctagctcccttcagcaactagtcactccctggttcttgtatccacatggtgagttgttcattaatagaacctttagcagcaaggctaggggaagctgtttgtacttgccaaaggccattctccatgaacgtagctgggaataggtgacccccaatttagaatgggggtgtgtataattttcttaagaagttggctgaagtttcatcatagtaataactaccatttattgtgtctctaacatgccagcagcttttacaaacattaatttttgtggctcgagaaacaaccctgcaaggtaggaggcagcatccttgttcttatggatgcagaatctgagattcagcaaggctaagaaacttgtacaaggtaaagtggctggcaaagagcagaggattcaaacccaggtcagtctggccacaaagtgatcacactgccctgctgcccactggatatccagctccagccttgcctaagaaaacatgttgctagtttttgagaatgaatgggaaaggagctggaacaaaatatgcctgaatatctgacactttataccatggtgtctggtgtttttgaatattaagttttctagattgaggttatcacaactcttgcccttgtcttcctttttattacttctagagtaattgcaggtttaacatcttctatcatgttaaaaacaaagttatttttctgattaaaaaatacctgtttatgtagaaaatacagatgtacaaagaggacaagtctcaaactatataccagcttctggttaagaatgtgtgtacgggagctagacttgcaagggtatgtatccctgctctgcaatttatgatttgtatgactttggactagtcacttctgtgcccgtttcctatctgtgaagttggaaatatcctactttattaggttaacatcaaatgagttaagagctgcaaagcccccaaagtgactgagaagtttagtattttaataaacttctggtcttcctctctgatctgtgtatacatgtgtaaatatacatgttagtatgcatataagccaaagtgaaatatttttcaaaccagctgcttttcatataattacatcgtgatcatctttcctaacttctaaataaccttctccatcacctgacaattgcctaaaaccccatgatgtgctggcgtgaatggaactgaatccgtgttactgggcatgcagatttccagttttgcactaacataatgcattttaaaacaaatttgagtagttgttgtgccatgaatggtatctgggtgacaggaacttcaagctcttttcagagcacacctaatcctccctcccctagtctaaatgaaaataaggatcaggaactactcccttcggagctcagaacctgccttaattctgaggcagcactgtgaacttttcatacgtcagccctaagtggggaactcactctggttctcccctctccctgccttcaaatctagaaaaaccatgtttccacgtttaatatctgatgtctcggttcccaataaatcacaaatcagaaagttctgttgttccattattgctatgtctgaggtgccccataagaagcctgtccataaaagggcttagaggggaagccctgctccctgtttcccagatcggactcctaaatcctgtccttcaggatggagtgctgcaatcccttttatgccatgctgggcactgtacctctgctattttagttttatgagattctgatgacatgcttatttgactttattgacacagaaccctcctgctggtctcaagattggtagaaaccattgattaatcccctcttaactccccccgccccccgccccgccaacgcctgcactgttttccactactagcaaatcaataggtcatgtttaatgacactactcttgcctagccactttcaggtgtattatatatgcagactcaagggatgtatttgtccattgcgtctgagctccaaagaggcaagagtgatgggcagaagtgatttggggtcagtagtcatggagtatacctcttaaaaggtttacagctttaatgagatttttctcctactgtcttagacaagaaatctccaaatgttggaaacttggtgctttaaacagtatacgttctaaaggaattcaaccgcatttcaggacctgttgactgaccaacctcagacacagccatatccgaagacattaaaggagagggcttgatgttccaattgagggagcgcatcatcgtctctcagaaagagtctaatatggtgatgagtctgccaaaattacagaggggctagcgtgtctttggggtgtgctagaatggcatcaggacttaagaggaaaaatgtgtgtattacacgcttgtaaaactcaaagcatcagttactctctgcagtattttccaaagtgctttttcattagtttccttctaacaccctccctgtgagaaaggttaagtagccttacccttcttccactcatgaggacactggaacagtaagaggttaattgacttgctttgggctctctagtgaggctgacccagctggaatttccaacttgcgctgcctggaactccagcttaccattccaaaggctctgtagaaccagggccacctcagagaaggcctccacagaggcaggaagagctcccagccaagcaagaggcatcttgctcagccatgttcttgctgtttggggactgctgaggcagagagctagtctcttcaaagttacagtccaagatcctcgacctagaaactgtttggctgcctggagctaagctgtaggagtgatggatggcagaaataaattatttttggctcaactgctcagtcttggcagggggccctttaaatttgaaatgttatcctgacgtctacaaaaggtttaggaatctgatgtcattttctccctatgattcacatgttggccttttctgtagaggggttaccaattatctctggtgtatgttcctgttaagggttctctacaattcggatactgtaaaatatgtaattaggatgatagagatggcttctaatatagagggtcccctgtacctctttttcttggccccaccaggcctacttgaatcatcttggctcattcctccctgcaaagtagatcctcactacaaaagccaggttggtggtgctgttggtgacatggtcttagacaagaagttactatacttgatgcttctattattcttgtgtcttgatgtacttttcctctggctccttaaattagccaaaatacttgcacgataaccaaaatacttgcaaggttgctgtgggctggaggcgagcaagcttaataagagtatgaaaagcatggaactttgaggcagcccaattgcttaatccccactctactgcttataagtttatgtagccttgggctagtggcctcttctttttgagtttcaagttttctcagctgtaaaaatgggaacatctagttcactgttaaactataaaaccacactaatagacatccatatcatagccagaagatcaagatttggtccagtgagagttggcatccaacctcatagtgaggttgtcactgttcttctgccacccagtccaccctcctttgcactcacttgtttactttaaaatgtggagtgaagtggaggtttgccatctggggcttggaactccatacattttattagaattggaaattaaggctgggcgtggtgaggggatgagaccggactgacgtgacctttctttgtgtttttctggagcagggattcctggtcacctcccttgctcttttcttcctggatgaaacaagaagataatcagggtgtctgtgcacaccaggactcagaagacaaagggatgggttctgattttgaggactctgaggacagggaaggggacccagaagaaagagaaatgggctctaatccacatgacacaaacaagagagaaggccatccggagccggagatgggctccaacccacaggactcaaggcacagggaagcagtgcccgacatctgcacaggtgaggagaaagctgggatttctatgcaagttgccaaagttacacttacttctagctcctctagaatcataactagcgacagcattctctgtaagggagttccatagaggggaccattaagcaggattctgtactgacttgcctctcttgtgttagcctgaagaccatcctttttttcagcccagtctgaggtgagctgtgaagaggctcactcactggcgcagtactttttacagtgtagagaatgctgctataaattaacccctggaacaacactacagtagaattacccagctagtaatagaatctacctcacagtgttattgggagagttaaatgagttgctgcatatagagttactaagcacagtactgtgcaaataggaggtatccagatgtttacagttacgtcctcatctccctttgcagataagtcatctcactggtaagtgacctgcctaggttcatgtggctaattcccaaagtgcccatggcctctgctaaatgccttactcttactgacctgaaagagtgaatgctgggcctccacccacctccttgtttctgtctttgggcattcattactttatcctgctcagtgcatgctctggggacagaaatgagctaaaatactttatggccaggactgagaggttacattccttcccctgtgacacagtcccagactccctgctgccctcctccgcagtgcacagaagcatgtgcaggagggcacatgtgaggcctttcacatctcagcaacttccctctgcttggggatacgcagccagagaccaacaggtgtgtgtcctggatcagcctctaacctgggctcaccagctctaggctctgtaatctctttctctattccccactactatccccctccccccacccatagcaaagtcctgaaggtgagttcagttttttgttccatcataagctgtttcagactgaccaaatgtactttaaaaattagtcctgagggctgggcgcagtggctcatgcctgtaatcccagctctttgggagccgaggtgggcagaaaacgaggtcaggagatcgagaccagcccgaccaacatggtgaaaccccatgtctactaaaaatacaagttagctgggcgtggtggcatgagcctgtaatcccagctactcaggaggctgagacaggagaatcgcttgaacccaggaggcggaggttgcagtgagccaagattgcgccactgcactccagcctggacgacagagcaagactctgtctcaaaaataaaaagagaaaaagaaaaaattagtccagggcctggttaggccaagtggtctttctcaggttggcagactgttcttgtcttttgagactagaatcttaaaaggcattggtagctcttggagtgagtaaaccttttctcctgagatcttacgtagtgtcccacctggcacagacttgaatatcctgaacacaggcagtcaggccttcagatggctctgctaggcagtgcctcgggtccagctaggggggcctgggcccgaggaggctgcctgaagaactggtgggcagagggggcaatgagtgcactctcctttaggcctttccctggaggatccagttgagagaggctaaactctcagggggtcttggaggggcagggatccagagtgcctgagggaggggatcacagttttattactgaggtttcctctgggcttatcttttgaatgccaagtatagtaatcccccactgccacctttttctgttgcagaggggcagctgagtgaggaagaaggcgtttctgtccgtggggaagaggatgaccaatccggtgtagctgacatggcgatgttcccaggactgtctgagtctgacagcatatcccggagcctccgggaggacgacgacgagagtgctggggagaaccggctggaggaggaagaggagcagccggcccctcccgtacttccctggaggcgacatctctccctggggagtcggcaccgaggtgacaagcccgcccaccgccgcttccaccggctccaccaccccatggccgtggacctcggggagctggatagcctggtggccagcatcatggacgcgcccaccatctgccccgactgcggggagagcttcagtcctggcgccgccttcctgcagcaccagcgcattcaccgcctggctgaggccgctgccgccgccagcctggagcccttcggcctggcgggcgagtgcgacgcgatggtgggcatgatgggggtgggtgtggcggggggcttcggggccgggcccccgctggcccggcccccgcgcgaaaagcccttccgctgcggggagtgcggcaagggcttcagccgcaacacctacctgaccaaccacctgcgcctgcacacgggcgagcggcccaacctgtgcgccgactgcggcaagagcttcagctggcgcgccgacctgctcaagcaccggcgcctgcacacgggcgagaagccctacccgtgccccgagtgcggcgaggccttcagcctcagctcgcatctgttgagccaccggcgcgcgcacgcggcggccagcggcgcgggggcggcggcgctgcggcccttcgcctgcggggagtgcggcaagggcttcgtgcgccgttcgcacctggccaaccaccagcgcatccacacgggcgagaagccgcacggctgtggcgagtgcggcaagcgcttcagctggcgctcggacttggtgaagcaccagcgcgtgcacacgggcgagaagccctacatgtgctccgagtgcggcgagaccttcagcgtcagctcgcacctcttcacgcacaagcgcacgcactcgggtgagcggccctacgtgtgccgcgagtgcgggaagggcttcgggcgtaactcgcacctggtgaaccacctgcgcgtgcacaccggcgagaagcccttccgctgtggccagtgcgagaagcgcttcagcgacttctccacgctcacgcagcaccagcgcacgcacacgggcgagaagccctacacgtgcatcgagtgcggcaagagctttatccagagctcccacctgatccgccaccgccgcatccacacgggcaacaagccgcacaagtgtgcgggctgcggcaaaggcttccgctataaaacgcacctcgcgcagcaccagaagctgcacctgtgttaggggctgggtccgcgggaggctgccgtctggggagcctgtggggggtagatatcctgggactgacccaggggaaggaagtggggaaggggcgggagggacaatctgagagtgactggggagcctttggtgtttggggtttcctgaagtgggaggagtgttgagtaagttggtctttcccggtgctatacttgcctcctctccacggaagaattgttcaggagatgcgcttggggtgatgacttccttaaatacacgctgtagggggtgaagagcttggaggaccaggcactttgaggaagggcagttcgtgggctggggtgggaacaggatggcgggcaatagactagggtaggccgcgatggcctgtagaaggttgcggggagagggtttaaatgagggttatggggcgaaataaaaccaagtataagtgattctatcttggtcccaccaagagtttgcccgatctccacacatcacctgttgtctcacaaaaagtaggggaaccttgtcagtcacataggacaggatatttaatgtacttttcctttctctgagccacagttagctgctattttgaggcatccaaggggaagtgggctgaaaaacgccacactcatttcaaggggcaatgtctggggtttagaaattcatttataactggttctctgatgtgggaaatcctgattctgtcccgggttctttgctacttccttgaaaatactctagcttcatgctgggtcaaggtggtttacctggatgacccccctcccccgccctcgcccatcccaggtgtgtgccacacccagtatttctttcaggtctcaactgtggtgttttaagtgcagggaaaaggaacaatcacagctatgtgtgactttccttttcccacctcaccttgatgtaggtgtttcaagtgaactttagaccaacagttgcccagtgacctgctaaaaagtcaactagctcagagttttgctggcctttatgtgagaaatccaagaaagtgttcacttttttgggatgcgagactccttggtctcatttgccttcactttgcatttgttagtgacctccactaacccccacttccatgcatattgacgagggatctagtctaagtaagaatgtcttttgcctgcgcgtggaggcacagtagaaatctcaaggctttacccagaagagcccagtcagggagaggtgtaaatgcaaaattgccaaatagcacaaacaatgaatgttttctggttgttatatagatgccaaaatagcactttgatatttgcaaagtgctttatgctttttaataattgttagctgtttctcacatcattgtgagttagatcagtattatgaccgctgtcttagggaaggcctgggaacaggagtgtgcaggctgtcctgaagagaggctgaggacagtgtgaataattgtagcctgaccttttgcattctccagctcagctgctaggaagacttacttgtcatgatttatataataaaattaaggacactgaaaattcttatgcttgatgaaaaacttaaggctagcctagaagggccaaacatgtccttattgacaaagctggtctttgtcgcctaattagggtatcctagctatgttccatttctagtaaggggctgtagttagatgactcttgtatagatttcagttacttatgctgaagatccctgtgctaggttagcctttagaagttagagttgtggaaagcagtattgttttcttctctagtgattgttaccctacacatttcatggaagcatcttcacaaaatatcagacacagtggaagggggaaaaaaagctacgagattgtttttacacttttagcaaagtttctgtggatgctagtaatttatacttgatcagttgtattctagtaaagaacctctttggggactgtaggaaagcatgtttttgtggttataaaaacacttaaaaatcctgataattctgggcttgtataatgcctgttgatcttgccctcttaatcagtttattgttattcacaaatgcaaataggttttcaaactacagacagttttgaaagacattaattctcattttcttctagtcaggagtaatacaagcaaacaagtgtccgttttgaattctgatttgtaatctgaatactaaacatattagacccacctgaaaataatatagccaatttctaggtaatcttactgctttgtgggtttctttccatgtacatctacctcttccagctgttttaagttttctcaagtctgtgcctatgaaatctcatccaacttttgattattcatggattgattatccgctttttttttgcttttttgctgccattgctatgcctggtctcgtctgcatcaaatatactacatatcagcaactttagagaatgggttcaacagggagtggagagtgaagctaatgtaaaatagtttagtggcagtgggaatctttggacttcatttacctctctcattatttctattaccatggataaaaaagtcagctgctacgttgatatcccttctatgagcacattcttagcagaagaaaacaatccaactaccaacacccgactctattggtgcatttaaaatgtgattccattttttcttacaattcttcagggaacttacctgcattaagtgaggttaaatgcattcaggaggttgtttgtttcttctatctagttttagaataatatttcttcggcaaaccctgctaactgcggttcacccttgaaaacgttaatctgaggactttttccaccaactcattaatgatggtggaagcaagtgtattatttgtttcctggagaatttgatgaagagcagtcttcctctgctgccctttactaagcaaaacctggagcaatttaaataggctaaatggttttgattaaatcttgagctccgagttggaaggagaaaatgagaagttaaccccttgagccatgtggtctctttacaatcaagagactgtacatatgtgaaaaaatacaaattaaggacctgtgttcatagacaatctaaactgtgtttctgaagtttgtgcacatttttcttcactgtaatgttattttacagctgtttgttaaaatagtgaataatttaatgatcctaaaagtaacaggtttcgtgtgagtgtgcttgtatacgtgagatttgccttattttcaggttgttttatttaacgatggttccttggacagcattctggtgttcagcaaccaatatggaatatttgtcattaaatccatatcagtcttttaccatgtcattcttctttgccacacattaaatgtcactcagctcta

SEQ ID NO: 122 - DNA, 3941 bp, Homo sapiens
actggtgctgaaccccgccgcgcgcgctttgaatttcccagccgctaagcgcctctcctggtcggtgtcccaggcagaaaggtgcagagacccatctgacgcaggactccaggtattttaggagggacccatcggcttgcttaattccctgggggattcgtctgaggctctttgcctctgcaaggggagaaccagccacagtttcccggaaggaataacaattactttaattctagctgaggactagactgctatggtccaaagagtcaggaaacgattgcaaggcaatcgttggcacagagaacagagcgactgaagttacaatccagcattttgtgaatctctgccttaggccagccagggcggagagggattaaaacaagctccgaagtgtgtattacaacacagttgagataggacaaaagaaaaacagttgtttttcgctcactgaaaaaatagtttgcaatagcggcaagcaagagcagtttgccttgtttcgggaaaggcaggaagaaacaccccgaaagtattaataggagaaaaggaacaggatttactgcaccttgcgggactcgctctgacgatccttgtgcctttgtgcactgcaggtagacaagctccagcagagagtggccagatgtggtgcctggagcgactccgcttgggtcctgagtgccttcggcggagcggagactggcttctcccgggtcgggcccgcggagccaagtctcgcaccaccgccgcgtgcgcaaatgtgctcactccggaccgcatccctgagttctgcatcccgccacggctcatgccccgcctggccttggctgcgctccggaattcttgggtcgaagaagcagggatggacgagggcgccggccgcacagactgggacccgcgctcgcaggccgcgctgtcactgccgcacctgccccgtgtgcgcaccgcctacggcttctgcgcgctgctcgagagcccgcacacgcgccgcaaggagtcgctcctgctcgggggcccgcccgcgccccggccccgggcccacacctacggcggcggcggcggcccggacgccctcctggggaccctgcgcgtcccgcgagctccgggcccggcgacccccgcggcccccggctgtccccgcccgccccaggacgcgctcgcccggcggccccgcggctgccgcctcctgcgcgtccccgacgggctgctgagtcgcgcgctgcgggctgggaggagtcgccgcctgacccgcgtccgctccgtctccagcgggaacgaggacaaggagcgccgcgcgggctcccagtccccggcccgggccccctccacgagcccgccgtcgtcccgggtcccgtttcccgagcgcctggaggccgagggcaccgtggctctgggccgcgccggcgacgccctgcgcctggccgccgagtactgtccgggaaccgggcggctccgcctccggctgctccgcgccgagagcccggccggaggcgcccccgggccccgagccgtcagctgtcgcctcagcctcgtcctgcggccgccgggcaccgcgcttcggcaatgcagcactgtggtggggcgcagccgcaaggcctcctttgaccaggacttctgcttcgacggcctctcggaggacgaagtgcgccgcctggccgttcgagtcaaggcccgggacgagggccgcggccgggagcggggccgcctgctgggccagggtgagctgtccctgggcgccctcctgctgctctgagggcccagccctccccggggcgctctgcccgggggactccggacactgacagccgcgtggtacaaaataaacgtgtatttgttgttcttatcagtcccgtttcagtacaacactggcagagatgattctagattaactatcccagtaaaagatatgatattttccatagatacctccagaatttttttcagcaaatggaatggttctacagtgtttcccaatatagacagccatttgcataccatatgtaccacacacgcctaggaaataatgaatcacatgaagtgttagaactagaaagtgtcttggcgatctgtttgctccaatcacctcattttaaaattggtgctttccacaacatgcatggagaccatcttggagcatttacttttgaagcattttgtttaagaccccggataagaaaatgagggcaaaagaggtgaagtgacttgtccaagatcaacagtgaattattagttggaacgccagcctgatactcctagctatatctcactggaaaagcattggagaaaatgaaaccattttaatattctaagcttaaataatagttataataggctaggtgtggcggctcacgcctgtaatcctggcactttgggaggccgaggcgggcagatggcttgagcccaggaatttgagaccaggctgggcaacatgggaagaccgcgtctccataaaaaatacaaaatttagccggacgtggtggcacgcacctgtagttccagctactctggggctgaggcgcaaggatcacttgagcctgggaggtcaaggctgcagtgagccgagatcgtgccactgcactccaacctgggcaaccggagtgagaccctgtctgcaaataataataataataataaatagttttacaagcgttaatttatgttttaacccccaaaaggaggcactgctatgcccattttacagatgaggatattgaggcacagaataaagagcagagccagaatttgaacctagacaatcagcatttcactcattactcttatgtaggtaataccacagtgtctaaagggctcgctattaaagttgcgagtattgtgcaacttctctctgaaactgttgacactgaagttcgtgtctacttgtattcctcatcctgcttttggtgaaaaaacaaattgcttgaaatgaataatttattatctcatgctaataacttcaggcattgagatgagctgatgggtctaaagctctgaggaggaagctaaccggcctcagaatcatagaaatgggtgccagccttgttgtaaccaggtgagtttatctgctggaacaggcagtggagagtgtacagatagcatggttttacctctggcttctgataataattccagatttaacaatcctgttttagaggacgattttccctcatcccttgaattcactgccagcagggcatttttttcttttttttatgcaaataggaaaatgcatcctaaatgagggtttaaaaaattgaaaatatttaaatatacaggatggtgttaaatatgactccattatcaatctggattcagaaatggtttctgctttattttatttcattttatcttttagaaacaaggcgtcactctgtcacccaggctggagtgcagtggtgtgatcatagctcactgcagcctctacctcctgacacaagctgtcatcccgctttggcttctcaaagtgctaggattataggcgtgagccaccatgcccgaccagtttctgcttttattaaaattgttcacagttttatacattcatgttcattaaaaatgctatttagaaaagagtttgataaaataaatattatacaaaattcgaagaaaaaagaaaagagtttctgtttcagtcacaaattagggttattgtgatgtgtatttatgatgaccattgaacaaatgtgaagaatactgtgaattctatgactttatcaaaatcagccacatccaggagcttgcagttgttgaccaaatgaatgatgacatagagtagttcagatctatcatgtgctcttctatctaatcagtcaatatttccttggccctcaagccaacattcattttttatgtataaccttcttcatgattttgaaattttgatagggtaactgctaatgagttcacaaatgtagcactttaaaaggaaaataaatggagagtgaaaacaa

SEQ ID NO: 123 - DNA, 5832 bp, Homo sapiens
agaaggccagaagacggctgtcaaaggtcacagggaaatcaaaggcggggtacagggccagagggaggaggaaacaacttcccggttgctttcagacgcttcagagatcctctggaggcctgggggagcttttgagtactttatttcagttggtccctgagctcggtgagtggggcgggtagagccaccaggggaatcaacagtggtttctcgtgcccctcagggtcaggagcagtctgatcaaaaggagggcatccactgtccggggccattcccacagctcccggatgctgggtctggaggctgcgcccttcccctgcaggagctcagcccagtggtaagtcatctgtgtgtcatctatgtatttaaccccttatggccatgttgatgctgagcatggtttcacttttgcaaacatttatttatacccttcgagagaaaaacgtctcagctgtcacaggaagctgcttcggggggtgagcaaactttttaaaatgcagaaattatgatctacacccgtttcttaaaagtaagccatcgtacttggttctctttaattatatattttcttacatattgtgttcatgtaggcaagtcctgtttctgctaaaagaaggtaagttctaccaaggcggtgtcatgccagctttatttcccgtggcacctggcacactgctaagcacttacatgcttaacaactagattgggaatggtgctgctctggggaagtgggcacacgttaaagaaatgtttatttcagtcttctgaaatagggaattactctggctaaaatgtagctccagaaagggaaagtggggctgtatgaatccaggtccagtttgttgtttcctccaggataaggcagctgtcggaggggaaaatcatctcccatttctccacagggcagtctgaagatggccaattacacgctggcaccagaggatgaatatgatgtcctcatagaaggtgaactggagagcgatgaggcagagcaatgtgacaagtatgacgcccaggcactctcagcccagctggtgccatcactctgctctgctgtgtttgtgatcggtgtcctggacaatctcctggttgtgcttatcctggtaaaatataaaggactcaaacgcgtggaaaatatctatcttctaaacttggcagtttctaacttgtgtttcttgcttaccctgcccttctgggctcatgctgggggcgatcccatgtgtaaaattctcattggactgtacttcgtgggcctgtacagtgagacatttttcaattgccttctgactgtgcaaaggtacctagtgtttttgcacaagggaaactttttctcagccaggaggagggtgccctgtggcatcattacaagtgtcctggcatgggtaacagccattctggccactttgcctgaattcgtggtttataaacctcagatggaagaccagaaatacaagtgtgcatttagcagaactcccttcctgccagctgatgagacattctggaagcattttctgactttaaaaatgaacatttcggttcttgtcctccccctatttatttttacatttctctatgtgcaaatgagaaaaacactaaggttcagggagcagaggtatagccttttcaagcttgtttttgccataatggtagtcttccttctgatgtgggcgccctacaatattgcatttttcctgtccactttcaaagaacacttctccctgagtgactgcaagagcagctacaatctggacaaaagtgttcacatcactaaactcatcgccaccacccactgctgcatcaaccctctcctgtatgcgtttcttgatgggacatttagcaaatacctctgccgctgtttccatctgcgtagtaacaccccacttcaacccagggggcagtctgcacaaggcacatcgagggaagaacctgaccattccaccgaagtgtaaactagcatccaccaaatgcaagaagaataaacatggattttcatctttctgcattatttcatgtaaattttctacacatttgtatacaaaatcggatacaggaagaaaagggagaggtgagctaacatttgctaagcactgaatttgtctcaggcaccgtgcaaggctctttacaaacgtgagctccttcgcctcctaccacttgtccatagtgtggataggactagtctcatttctctgagaagaaaactaaggcgcggaaatttgtctaagatcacataactaggaagtggcagaactgattctccagccctggtagcatttgctcagagcctacgcttggtccagaacatcaaactccaaaccctggggacaaacgacatgaaataaatgtattttaaaacatctatttaatgtattttaaaataatttgtaagttgattttaaaaccaatttaactacattccaaattatagacagcccatttatatgggagtaacttttcaggctcattgcctcgccggtgatgagaagaactagctagctggaagctgtgggaaaaagaggtaaggtaacttgttctgtcgaagttctctaaattctcttgcttacttgccacacccctaggcccccagcttcccctaacccaaggtttctggtattttctcgtactttatcaagactatggaatcttaggagacttaacaaaagcaaatgagaaattatgtttagaaatgtctaacaaaatgaatgctttgtccttttaagtataacacatacctcaggcctcaccagcacataactacaaaaggttgtcccacttcctttctgtggctgagttagtagaacacaggctcccacctgccacatcagcagaaggtcacctcaacatgtgagctacctccccggagaccccccagatccgtaaggatgatgcatccttgatcctaaaaacattttcctgttcctggtgttcagaattggactccacactcactggtctctttataatcttgcttctggccctttgaggcctcaaagctaccagggccttgctgccaggggacaatcaccactcccggctgagtcctgcagacatagggcctgggctggctgcctcctcctgctggcccagcatcttgcttgcactaaagagagctggaggcttggcactgatgcttgctaaaaacctacccaggccgcccactgctgccgcactgcagggcaccagcccacactcctcccctcctggcatcaggcacacgttcacggcactaaaccttacaggaaagcagtggaaccctgtctttccttcacaggaggcactttccttcctaggcaaaaacgatgatacccatgggcacagcatctcacatagggacacatagagatgtctgactcattaaaacccaagtctctggccaattaaaaggggtccttaatgtcctactcaacagtggtggaaggaaatttgctctatattgatgaaatgaggtggagaaaatctgattttccaaacatgagaattctccatatgccaccccataaccaaagaccccttatttgtgttagatgaaacattcaaagagcctattaggatagcggatgagacccccaagggacatgcttatacaacaataactggctccaaaccacactccatggcagtggctctcaaatgccagctcacatcacaagccctgtgctaaaacacagagttctgggccccatcccggagtttgtggttcaggaggtctggagtgtgacctcagaatatgcatttctaacaaattccccaggggatgcagatactgctgacccaaggccctccttctgagaaccactgttccagggagaagaaactcagctaagtaagggtttggctttgtgctgaagacaatgtggaatttagagttggggtgaattattcaggaaagtagagaggtttggagatgtgagggtgggaagcgcagtggagggaggcagagaggaaatatgaagcagcgtcagttggagagaaattaggaagaggaataaaatgatatatgccagggatttcagttttgctgagcccatgatgacagactcttctctggcaccttatgccactcattgagggcttgtagctggctctgctctttcagagtcataatagggctatgggtctgacctcaaggtgagctggaatgggcacaagtaatagataaaactgcaagaagtcactcaagggtccttcctagaacaaaggatccctacattccaaaggcgaatgccggtcactatcataaaagaaaagaaagaaagaaactgatggtgacattttaaatggcaatttttctagcttctaaaaggttgtggagcaactggaactttcataccctgctggtgggaatgtaaaatggtataatcactttggaaaaattggcagtgtcaccaaaagcaaagcctatacctactatccatttcactcctcagtatttacccaagagaaatgagcatgtatgtccatacaaagatttggacccaaatgttcatgacagccttatttatatagcctcaaactagaaaaagtctgtctatcaacaggtgaatggataaacaaatactggcctgtgtatctaatggaatactgctcatccacaaaaagaaacgagctattgatacacacaggagcatgcacgaaatctcaaaatgctgaatgaaggaggccagattttaattttatttttaattatttatttatttatttatttttgagacagagtctcgctctgtcacccagcctggaatgcaatggtgtgatcttggctgactgcaacctctgcctcctgagttcaagcaattctcatgcctcagcctcccaagtagctgtgactacagtcatgcacaagagcaactgactaatttttgtaattttagtagagacggggttttgccatgttggccagctgctctcacactcctgacctcaggtgatccacctgcctcggcctcctaaagtgctgggattacaggcatgagtcaccgtgcccagccggaagccagatattttttaaaagtacttattttgtgattctatttatataaaattctagaaaatgcaaacaaatccatagcgacagcaaatcagtggttgctggagatgttggaggggagaggagaggaatagattgcaaaggggaacaaggaaattcggggggacagtggatatgtctgctattttgactgtggtgatggtttcattggtatatacatatgtcaaaaacgtaacaagttgtatacgtgatttattatgtgttgactatacctcaaaaaggctattttttaaaatccccctcaggctccaggcactccattacgttggtgtgacttgtcttggaaatatactttgagcatttgccggaggagatccagtgcctgggcctctgtttcttctcccaagtagaattggcagctaaaacgggatgcccatgggcacaacttgtcacccccatcaccgaacagggagcagaaggaggctgctgggggtgcccccacagggagcacagtctcatcgggaatgacctgccatggcaaataaaatcaccagggcaagtcaagggagagaccagggaagagagtgatccagtctatattaaaaaaggatgagaaaggttgaagaaaaagagaagaagggacagaaattctcttcacacatttgcagaagtaggtccggactctccatccacttctcctcctccgataggtaggacaggaatctcagaggaaatggcatcatcttcccatgtttacagacacagcaatgaactcaaagaacaatcttatcaggattttccaaatgaaaacatggagcatatagagaataaagatccataaactcgta

SEQ ID NO: 124 - DNA, 176056 bp, Homo sapiens
ggactcgcgtcccgtggagcgttccaggcgggcgcgcggctttctccccagacccaccgagtggcggcggaggcgagatgcgcgggggcgtgctcctggtcttgctgctgtgtgtcgccgcgcagtgccggcagagaggtgagcccggcccgggtcctagggtccctgtcccccgcaggcgggcgggcgggggcggccgcggacaaagcccgtcgcgttggggctgctggagtccgggcgcgcatcctgatccacctcggagtgggtgtctcggccacgtgggtctcccgcgcttgccggggagggctggatggggacgccgctcctgccggacgctgcccgctctttgcaggcttaggctttaacctcctcgggctttggggttaaagcccagcctcgcctctggcttttgcgggacttcgcgacccaggagcgccatctacgcgagcagtgctgggggtggcgggagcggggcgcccggagcggggcgccgggggttgcttttagtgccccggctgcgcgggcgggggtggcggggctgttggccgggcgcgggggatgaatggagaaagagctctcccgagtcgccctcattgtccggctgcgcaagctgggtcgcggcggccgggaaagggcggattcctcggggcccctggcagccaagcgggctagtggggagagacgcggcgagaagggcgcccctagccagccgtcccgggcagggggacccgcaggcggcgtccagggcactgatgcgccttcccgacccgcgctttttgtgcaataggcgaagtggccaaacccgctcattcactgcgcgggattgaccgtgggcgcgccggggcgagggaccagcggagaagggagcaccttgcatgcgcgttgcaaggattgagaagagaaactcagagcgaattttcattttctgtttttgcgggcgggcggaaagagagagagagagaagaaagaaagagagagagaaagagaaaagaaagagagagaaagaaagaaaaagaaagaaagaattcttttcccttttgggggacaaccctagtcacccacgccacccctagagctgtcttcgcagcgtggcttcgtgttggctaggcagtcacaaatatttgttgaaaacatcttaatgtatgcagcacatgacaatgggcgtattcccacgaatataaacttcattaaaaaaaaattcgagtcaaaagtagtgggcggaatttgcagtgccctcgtgggaaacgtgtgtttgggcattgtgctgagttgtgagctctgcagaaacgcgaccatctcattcattcaagcattcatgatggaagcactggaccggagctggaaacgcagcattgaatagctgcgagtctgctgcgcagagccaggctgggaagagggaatttacatagttatcagccagaagaaaggagcctttggggagggagaggagccttaaaggattgcgaggggactcctgtctatcaggctgctgaaggtgaacaagtcccggtttcccacagggtagagaaagagcagcttgcctcagcttattgttccccgaaattgaaagtcttagactgaggagatggcctgaaggttgtcctggcccctcggggctcggcacttggcctggcggttatgagtggtttttggagaaagtgggacctcatggggctttcctgctttgagatgctgcggaaaacctcccagggcaggagccctttaatgtttcatatcgcattccctgtttgcctttttgccttccgcaccccaccaaccctcacccttcctaactagcctccttgagcagttttgattttttttttttgcagtctccgggctgcaggcaggagtggagtggcaccatctcggctcactgcgacctccgcctcccgggttcaaacaattctgcctcagcctcccgagtagctgggactacaggcgcgtgccaccacgcccggctatttttttttttttttttttgtatttttagtggagacagggtttcaccatattggccaggctggtctcaaactcctgacctcgtgatcagcccacctcggcctcccaaagtgctgggtttgcaggcgtgagccgccgcgcccggcctgattttttttttttttttaagaaacgattttgtgccccatgaatagcatgaatgatttgtaaagttgtgtgttttggtcaataatcctgacctgcaaatcacctgctagttagttgtctggtgttattttttaaaataacttattatctattgacattcagattgttagacgttccctgtcatttctgcagtctctctgggttaccttacagctcatagtatatgacctgatggctcactttcctttgaaatttaatgagtttcaagtgagctcctcctaagtattgaataggacgtattgtgtttgtaaaaataatgtgttaaattcatagctggcaatcacataaaattatggttgcttcatcacttttgttggaaactatcccttctttttttctaaaatagacaattctaaggacagaaaaaaatctacaagaaaattcacttcattctcatatatgacatagtattcaaatttagcaagtatgtgctccacagtaaagtatgcatgcctgaatggatttcagaggtgcgttttttcttttctgtcactgtattctctaagggcccatgaaaaatattgatcgtagcagttggaaacaagggtatgtgtaacagaagcctcactgcccacctcctacatagcctggactttagtccattctttttttccttcttcttttccagacattaaatatgaagcctacatctgtagttaatctagcatgattgagaattcaaatgcatcaagaatattagaataaatacatatactgatctttagtgtcttgtgccactgctttataattgcactgctttataaactcatataaaatgcttctgggaccatttatttcagggtaatgatccttgaaatgccctaccattttatactaattcattcataaaatcctatggatattcattttcatgtacagtaaattgttatggggaaataacacaaggtctgtctttaagcttcaggtgtttaattctctggctttactagctatggcaaattggggacataacgtgtgttttagtttcactgtctgtaaaatgggaataataatagtgcctacctgaaagggatgttaatgattaaatgaaataatgtgagaaaagttgttagaccagtatctagtacagagttaaccctcaacaagcaagtttatttatgttcatcactgttactattttataaagaactatatatttttaaactatattctccaaaatgcataattgtttagaaatttgaagtctggatttggaatcaaatagtcttgggctcaaatgccagacctgtcactttaattagctatggccatggctaagtttcttaacttctctgaatgtcagctttctatctataaaatggatagcattgatactattaaataatatgtgaaaaatattagcacagtgtagggtgtgtcataggtactcagtgcatgatggttattactgttacacctattgtacttgctcatcatcctggacatcatctctctttcattgctgaaatccatttggtcattgagacttattgattttacctcctgaaaatctgtgtagtctctttcccttttttcttttttttttttttttgagacggagtctcgctctgtcgcccaggctggagtgcagtggcacgatctcggctcactgcaagctccgcctcccaggttcacgccattctcctgcctcagcctcctgagtagctgggactacaggcgcccgccaccacgcccagctaattttttgtattctttagtagagacggggtttcaccatgttagccaggatggtctcgatctcatgacctggtgatccacccacctcggcctcccaaagtgttggtattacaggagtgagccactgcccccggcctctttcccattttttattctcactgctggctagacttaggaattgtttgtttttctcaggttgtttgtttttctcaggaaatagtgtgatggttcactcagcaggccagcagcctcacctgttctccctcctcagcagtgccatcactgtgatgtttctagaaacaccatctcgataaccgctcctactcttgtttaaaattcttcccatttctcaccgtttctttatcaaattacttaatgttccccaatgtgacttactttccttcatgtttaagcaagtggtcttcttccaaggtgtgcccttttcactccacatccttctccagggcccaccctataagtttagattatgtgccccaaacccctcactttataagatgcacaaaatgacagtgtcctgctgtgtcacattgggggtaaagcaaggaggctgggaccccagctggcctgctgtctcagagctgagaggcattatctgggatacgcctgcacctatttgtagctaactaatgtttcctggcacatgggctcttaagtgccggacacatctttcatttgggttctaaagaaccctggaaaatcttcccagctctctctctgctgaagtatttgttagacaaccttccctgtactcacagggctttccctgctcaatgctattgtcttgcctgtcatggggccaatgacttatctggctcaccttctctctcggccttgtcaagggcagggactgttttatgcatatctgttcattgctttgcagtgtttctagcagttagtagccacttcttgttgttgagctaagttgaaatgaacatctttatttaggaatcaagtaactttaaaaatattttgaatagctgggcgcagtggctcacgcctgtaatcccagcactttgggaggccgaggcaggtgggtcacatgaggtcgggagttcaagaccagactgaccaacatggagaaaccccatctctaccaaaaatacaaaattagccaggcgtggtggtggggcctgtaatcccagctactcaggaggctgaggcaggagaattgcttgaaccctggaggcggaagttgtggtgagccgagatcgtgccattgcattccagcctgggcaacaagagtgaaactctgtctcaaaaaaaaaaaatgtatatatatatataaaatacatatatgtgtgtatatatatatattttaatagataatccacatttatggtatgaaatgcaaaaggtactataggtagaaaaaagttaagacttggcttttttactctcttttgaggtaaccactggctttaattttttggataagcgtctaaagatgtttcttcaggtaacttttaaaagcaagctacatcataaaatctacttcttccctattagtgtaagagggacaccagtgattttctgccaaaacatggatgcatggaacagtatccctctgtccactgtcctcccctcatactaacttctttactggaccttgtgctggatattaacacatcatttagtaaatgtatgtacttgcaaacttttcaccttgcaacttgtccttccaagtagggctttgacagaaaggtattgttagagcagtgtttcctagatcttttggggtttaaaaacttgattgatttcatggcattgtactacttctaaaagtattgtttactatagtattaataagctatttttaagccatagagaattttaaaaaatatattttagaattttaagatttatgatatagagaagttgagtttgagaacaattctattacacgttaaggataagttaatgtattgaccaataagtatgacttattactggaacactatggcaggtacagaaaatatgtatttaaaaaaatttctaatgaagaagttaagtctacaccttgaatacagaaattaattgatagcgactggacagaactgtggaacttagaccttagctgaagtttttcgttacattcttcagaaatatttggatgaactagataaactatcatctcctaagaatgatgtatgtagttacttacaagtttgcaaataattcttttacttgttttatttctaaaatatcaatatgcatccatggacaattgaataaaccaaggcattgcaaaattaacgaggaggaaaaacccttcatagaagtaatttagttaaggtcatgaactttggttctgttggaacacgtctgtcagggagctatttcagcataaaacgccacacgatagctggattcattgtattttcatgtcctttatactgggtgtgacagtgcccagagtaaccatttgataataaatagcacagaatcttcccacttgtgtctttgttttctcaaggctggctcaggagagctttctttgggttaacttgttcctcatcttgcttgggggcaggaggcagacaatggaggcagagagattccaaatcagcttgggtagataacattcttgcctaggtaagcatttatctcgaagtgttaattcagaaatggtggcagagaaataccactgtgaaatcaccagtgtgacttcagtgtgcgtgcacattttttttttaatcaaccatttgaagtttgaatctcttcattccagaagttatctttgaagtctgatctgctggcccagcaggcagtatgactgacattcttgtgccagagaacctcctgtattgctggtgggaatgtcaaatttagatcaatgagtatttatggaaagtgccatcttttctcattcccgaaagtatttcctgcatcttgttccattgctccatagtttcctgccagaacttcaggagattctctatgacaatagcagtgttaaagaagatgcttaaatttagcagatgatttttagttaaaagagaacaattagaagtggggggggggagggaaaaaaaaccctcacaccacagttgattatggtacaccatacttttttctttgttttttcctttgacatggagtctcactctgttgcccaggctggcgtgcagtggctcaatgtctgctgactgcaacctccgcctcccagttcaagcgattctcctgcctcagcctcctgagtagctgggattataggcgcccaccaccatgccaggctaatttttatatttttagtagatatggggttttgccgtgttggccaggctggtctcgaactcctgatctcaagtgatccgcctgccttagcctctcaaagtgctgagattacaggaatgagccaccatgtccagcctacaccacacatttaaatgtcttccaaccttttggtaatgacagaattttacccacaacaagtggaatcttgttatctccagctcaggacaaggaattcgttctttctccagatggctgccctccctgtttctcctgttcttggcattcttttggttacctaggcttcatttccttttctgtttttctttttctgtatccccttatccaaattgtctctcttaattttgtttctttccttgaaaaacttcctgatctttttgttttagtttctctctgttagcactgcaaatgccaccagcctctaaaccagctgctatagtgtaactagccgcttttttttttttggcagcgggtggggggatggagtcttgctctgtcacccaggctggagtgcagtagcgtgatctcggctcactgaaacctctgcctcctgggttcaagcgattcttctgcctcagcctcccgagtagctgggatcacaggtgcgcgccactacaccctgctaatttttgtattttagtagaaacagggttttatcatgttggccaggatggtctcgatctcctgaccttgtgatccacccgccttggcctcccaaagtgctgggattacaggcgtgagccaccgcacccggccagccggctgctttttatcgggtctgtgatgctagctcgtgtcctttcatttaatccagtcccacactgcagttagagtaaccccgccaaaataccgccttcgtaatgttctccctctgctcctgcccacctgctatggccctcagtgatccctccaagttcagtcaccccgcccttctccacacctttctgtagctgaactattagcttccattgcaggggtctccttcctgtctaactgcacgtggtatattgacttgcagctgtgtgatttggttacatgactctctcacctgaaatgtactcccgtttcccactgaaaacctaaccagaccactcatgcacaggctgcaatataccaaccccaggacagcctcgatgtgatggcctgtttcaactgtctcacttctgaatctgcattgtattttgtgataaattggagttcccacccagccaaagttgccatccggtcctcttttgaatggctggtccagaatgacatgagccagtgtcaaaaagaagggacatttctgtttcgaagatcaaaaccttagctcccggcatttctttgaatacacagacaaccccaggggggttctagcattaaaacctgggtcattagtagccggagggcagtaacaccgaggaactccccacaggtagtcaggttgcctgagcaaccataaagccggtccccggactctggataacaaacccagccctggcacctctctgggtatgtggtccttcagcctcttagactttgtatcatccaatcaaatggattgcagttgatttgatctgggtaggaaccaaaatctgtgtttcaaaaaaccttttcccattttgtatccagaggcacaagaacctttccagttggtcttcaagcagaccctttgggtttctggttcaaatagttgtttccagaactcttcctgccactgcttgctttctgtccttgctgctgtgtcctgtgatgggctagcactctttccccacccgtcaaaatccacagtttgtctcttcagcccttttatctgaatctccaactctgccatttttacctttgcttttgtacaaactaagtttttccaactctttgcaacttcacccctggcttcatgggcatacttttgttcattctagaagtttggagtggggagaactggagataatgcatccacatatgaatgcttttggaagctcccagtgtttttctttaaaagggagttagctttttttttttttttttttttttttttgagacagagtctgtctcagtgcagtggcatggtctcggctcactgcaacctctgccttccgggttcaagcaattctcttgcctcagcctcctgagtagctgggaatggcctgccaccacacccagctaatttttgtatttttagtagagacagggtttcaccatgttggcggggctggtcttgaactcctgacctcaagtgatctgcctgcctcagcctcccaaagtgctgggattacaggtatgagccaccatgcctagctgggagttagcattttatttttatatttatttttttgagacagagtctcgctctgttgcctaggctgaagtggtggagtgcagtggtgccatctcggctcacagaaacctctgcctcccaggttcaagtgattctcctgcctcagcctcttgagtagctgggactacaggcacacaccgccatgcctggctaatttttgtatttttagtagagacggagtttcactatgttggtcagggttgtctcgaactcctgacctcgtgatccacctgccttggcctcccaaagtgctgggattagaggtgtgagccaccgagagagttagcattttttcttttctttttttttttgttattttttttatttgagacggagtctcgctctgtcgcccaggctggagtgcagtggcgcgatcttggctcactgcaagctctgcctcccagattcacgccattctcctgcctcagcctccagagtagctgggactacaggcacccgccaccaggcccggctaattttttgtatttttagtagagacggggtttcaccatggtagccaggacggtctcaatctcctgacctcgtgatctgcccgcctcagcctcccaaagtgctgggattacaggtgtgagccactgagaaagtattttagagttaacacctcattggagaggagaatagtatttccttataggagtattgtcatttctattcagtttttaaattttttttcatgcacttgatcattcatttattcactcattcatccatgcactgaagacactttgggacctccactcctccaggccctgggtcaaggatgttcaaaggtagtgtgtctggagagccctgttctcggctgccttcctcactgtgaatccaggacacttcttggcattcttagtgtatttgtttttgaagtccaaggaactgaaaagtgcatatatcaaaaggagttttctggctgggggcggtggctcacgcctgtaatctcagcactttgggaggcggaggcgggtggatcacgaggtcaggagatggagaccatcctggctaacacagtgaaactccgtctccactaaaaatacaaaaaattagccgggcgtggtggcgggtgcctgtagtcctagctactcaggaggcagaggcaggagaatggcgtgaacccggcaggcggagcttgcagtgagccaggatcacgccactgcacttcagcctgggtgacagagtgagactccgtctcaaaaaaaaaaaaaaaggagttttctccataagaaatgatgatcaagtaaggagttaaagtcataggagtggacattgccatctacgttctgcttgctcatattcatgtaagttaggggtgaaatgagtagtccaggtcatgggtcgaggaaagcgggggaggaggggcagaggcgtgcagcactggctggctgctttattggaggtgcggggtcagcttctacatcatatgccactgttggtgggtggtggctgtttcccttaggcttcctttcttccatggagaactcagagtcacctgcttggccagcacttctgtgtgtgtcagaagagcagactcaaacagtgacacagaagttccctctgtgggctgcacattaaatttcaataatatcaatacccaggtcttactcccagggattatagtgtgtccggtctggggtgggggtcatatcatttgcattttaaaaatgcttctggccgggcgcggtggctcacgcctgtaatcccagcactttgggaggggccaaggcgggtggatcacgaggtcaagagctcgaaaccatcatgaccaacatggtgaaaccccgaatctactaaaaatacaaaaattagctgggagtggtggtgcacacctgtagtccgagctacttgggaggctgaggcaggagaatcacttgaacccaggaggtggaggttgtagtgagctgagattacgccactgcactccagcctggcgacagagtgagactctgtctcaaaaaaaaaaaaaaaatgcttcccaggtgattccactgtgcagccagggttgagaaccactcagttaacatcataaactttgtaggtgaatgcagtttacacagcaatgcaaggaggcaggatctgccaccatccctcgctttgtctgtagggtgcaagttggggcattgatcccgtcctgcccaccgcagcccacagactagtgctctgtacataacagatgtggaatactcgggtcccaactgactctcctcatttcatgtctattttctgatattcccacagctctgtgaagtggggataacaacacccacacatctcagagctgtgagtaatccctgcacttagagaccacgttggatcagtgaagtggctcagggaaagccagtttcttctgtgtccccattgtcccttgtgtaatgttttttacttggaaagttctcacctgatggttcattgttgcacttgtgtttaaatgggtttccccacagtttagtcttgctttgctgacttggtcattcgccaagacccttctttgaaaaatactcttgatcatgtatgacatttagagtcctcaagttttgggataaagtctggtgttgcagaattgggtgttgattgatctggtgttgcactgaattgttcattctttaacgaattcatccaaaatttaaaaagtgtcctccatattcaggcattattctgtgccgcatcccttctttctcaatgcctttaaatggacaggtcacaggagccttttctttgggattatctgggccacccccttcttcccttatacaacctgctgatctcctcttgcaccttctcatgtctggcgactccagggtctagctgtctttattcacctactgctcctgtcctcttctgctcttgtttgtttatttatttatttatttatttatttatttatttattttttgagatgaagtctcactctgtcgccgaggctcgagtgcagaggtgcgatctcagctcactgcaacctccgcctcccgggttcaagcaattctgccacctcagcctcccaagtagctggattacaagcaccagccatcatgcctggctaatttttgtatttttgtagagatgaggtttcaccatgttggccaggctggtcttgagaactcctgacctcaggtgatccacctgcctcggcctcttgaagtgctgggcttacaggtgtgagccactgcgcctggtctgctcttatctttaataattgataattcattatgcacttgcttttctggcctccttcagaagttttcctcaatatttggcttattatttctcttccacccaacaaaacgagccattttcctttccatatccctgtcacactcagacatacatgcacacacacaccccttacacatctgcctatattgacttacagaccagctgcctacctggcttccctgctacaggcacttggggaggtatcgcactgaacccaaccgagcagagccagaacctgggcctgggcccgtctgcagggtagagcaggttcttctggaagggccagtccagctgcaagtgctgggatgaagtccaatgtagcatgtaatgtaacagttttccaagagcccagaaagctgttgacattggaagttccctctgagttaatggactgtgaggttgaccgtgtcatgccatccctgttgaattgcttcaatggcatctcattctctattgagtgggacttctaaggccctgtgtggtctgaccctgcccagacctctccacagcctcttctcccactgctaaccacatctcgaccattctgtgatatctgtagttccatcacgggagcttcatttcacctatggcactctgacggactccagcccaccctgtcatccttcttattgtttccatagcgatttctttgtacatctgaccagtacaccatttttcacctatttgttgacttgcctgtctctccttaagggccgagagttttgcctatatttgttatgcctagcacagtgcctgacatacaatgtagattctgtaaatatttgttgagtgaacaaatcccaatacagacaagcaatggaaatctgttaatagtaggtattggctggacgcggtggctcacgcctgtaatcccagcgctttgggaggccgaggtgggtggatcatgaggtcaggagttcaagaccagcctggcccacatggtgaaaccctgtctctactaaaattacaaaaatcagccaagcgtggtggcggtcgcctgtaatcccagctactcaggaagctgaggcagagaattgcttgaacctaggaggcggaggttgcagtgagctgacatggtgccactgcactccagcctggcaacagagtgagactccatctcaaaacaaaaacaaacaaacaaaaataatgggtattatttagagaccagacagacggacagaggggttagggcagtaactagtgaggaagcagagcgaagatccgctggggaggggcaggggctggctccagaaggctaggagacctcagtgggtcacccaggcaggatttttttttttttaagacggagtcttactctgtcacccaggctggagtgcagtggcacaatctcggctcaatgcaacctccacctcctgggtttaagcgattcttctgcctcagcctccctagtagctgggactacaggcacccaccaccatgcctggctagtttttttttggtatttttagtagtgatggggtttcaccatgttggccagactggtctggaactcctgacctcaggtgatccaccacccatctatctcggcctcccaaagtgctaggattacaggcgtgagccaccacaccaggcctcaggcaggatttaaaggtggaacaaggaagaatccaggtaaccagactaagaaagagaatggatagaacttttggaaccaaggcctctgctcacattattttttttattttttatttttgagatggagtctcgctctgtcacccaggctggagtgcagtggagcgatctcagctcactgcaagctccgcctcctgggttcacaccattctcctgcctcagcctcccgagtagctgggactacaggcgcccgccaccatgcccggctaattttttgtatttttagttcaccatgttagccgtgatggtcttgatctcctgacctcgtgatccgcctgcctcggcctcccaaagtggtgggattacaggcgtgagccaccgtgcctggccggcctccactcacattctaaaccagaatacaaggtcaggaacaagccagcagcagaaacaagaagttcagacactctctgcactcatgagtggagtccaaatatggttacagaaaatccacagaatctagtaaccaggaggaccctgatgacttgaagacattattaatctggcatgttctcatctacccaatcaatgcaaagaagaaatggattacattttttgtaataggattatttactgatgatgaatattccattcagccttaaaacttacattatactcaacaaaaacttatttctagatttagagccactgatctctagccagaaattcattaacacacatagtcaacaagtatttgttgagtatctagaaagtgccatacaggtgacaggtggaccttgtactccagaccccagtgctaggagtcaagcatgagaagtgtccaagaatcctactaagtgtgttcctcagttcagatttgggagcggtttctgtttctgaaagtctcagacacctgtatcactccacttattgctgtgggatagtatcatcgtcaacagaaagagaattgtaattaaacactacatttctactgcatgaagtctccttttaaagaatatgacttcaaaatactctaatgtgactgcagacttgttggcatttgctgagtagtgatatttttacgtatagtagaggtttttcttttttttaagggaactctacctgcatggctttaaagggctttctttaagtgagagaacagctgttctcctccaggcgttctgggctaagacttcctcctcctctcaggaacagaacaaaggcatacagaatttatgtcatagatggatttttgtttgataaatatcacttattactaaacaaaagaatggcccattctctttagaaatatgagcataacatctcctttgtctttagtggtttctaactttgttggtttacttttaattattataattgactgaatttaaatgggccgtgttttatataatcaaactttccttgaaaatgtatgtataagatggttattggtaaagggaataatttcaaattcaatattaaaataaatccaaaataatatttgaaggaatcagctaataaagaaaataaccctttggtcactgttgtaggggccagatgtggtggtcacacctataatctcagcactttgagaggctgaggcaggaagatcccttaagcccaggagttcgagaccagcctgggcaacatagggagacccccccagctctacaaaaaaaaaaaaaaaatagaaattagccaggtgtggtggcatgcatctgtagccccagctacttaggatgctgaagcaggaggatcacttgagcccaagaggtcgaggctgcagtaaactatgattgcaccactatattctagcctgagccacagggtgagaccccatctctaaaaataaaaatataaataaaacgtgtatccactttttggtggataatggaagccactgaagaagatggaggtacacgaggattggttagtccctacaatctgaccacatagataatcacaagagaataacttggatccaacacgcacttctgcaatacacattatgaacatacctttactagcaagcagactcataacaagtcctaggccatatccttcaaactgatagtcacagctttctgtctttttgggtattcagacttctctcttggtgattggccgccttcctaatgctggatacaggacatttcagggatcaagcatcaggttccatcaaattccttcaggatgtgagtttcaggccacataaatttataccacttacttacaagagtgaggagaatctctgttttaacagttttattgtagtataatttacataccctaaacctctgccaattgttaagtgtacagtttaatgttttttagtaaatttagagtgctatacaatcacagtctggtatgaacctttccaagactgcagaaagtgtcatcattttcatttgtgcccagaaatcttctgctgtctgtactttgggaagtgcctgttctggaaatttcatatacatggagtcatacaaaatggagtcttttttttgagacagagtccagctctgtcataccccagctctgtttcccaggctggagtgcagtggtgtgatcttggctcactgcagcctccacctcccgggttcaagtgattgtcctgcctcagactcccgagtagctgggattacaggcacctgccaccacccctggctaattgttgtatttttagtagaggtagggtttcactacattggccagggtagtctagaactcctgacctcaagtgatctgccagtctcggccccccaaagtgctgggattacaggtgtgagccacctcacctgaccaaaatggagtcttttgtgtctacttctctcggttagtgttttctaggttcatctattttgtagcatatgtcaataatgttctactttattgctgaatggtattccagtgtgtagatacaccacattttatttattcagtcatcagttgatggacattttgattgttttcaggtttttggagctatcaagaagaatgctgtaaacattcacatacaattctttgtttagatataggtttcatttctcttgagtgaaattcctaggattagaatatggatcgtgtggtaagtttgtgttttccaaagtgtctgcactgttttacagccctaccagcagtgtctgagtgttccatcttccccacattcttaccaacactatgcattacctgatgatagacatacagtgagttcaaagtggtatctcatggtattattttgtatttctccaatgattaatgacattgagcatcttttcagatgcttcttagccattcatatatctttggtgaaatgtctattcaagtattttgcccaatttttaatcaagttgtttatattcttagttaagagttttgcatatttcctggatacaaagtctttatcagacatgtgatttgaaagtattttctcccagtctatgcttgtcttttttttttttttttttttttttgagacaaagtctggctctgttgcccaggctggaatgcagtggcgcgatctcggctcactgcaagctccgcctccctggttcacgccattctcctgcctcagcctcctgagtagctgggactacaggtgctcaccaccacacccggctaattttttgtattttttagtagagacggggtttcaccgtgttagccaggatggtctcaatctcctgacctcatgatctgccctcctcagcctcccaaagtgctgggattgcaggtgtgaaccaccgtgcctggcctatgcttgtctttttgttttcttaatggtatgttttgtagtgccataggttttttttattttttattatttttatgtttgttttgatgaggtccatttgatcaattattttcttttgtgggttattcttttggtgtcatatttgagaatttctttgcctaatccaagatcttaggttttcttctggaaagtttataatttagctcttaaatttagctcttatgatccatttgagttagcttttgtgtatggtaaggagtcagggtgtaagttcatttttttttttgtttttttttaaatttatttattttttattgataattcttgggtgtttctcacagagggggatttggcagggtcataggacaatagtggagggaaggtcagcatataaacaagtgaacaaaggtctctggttttcctaggcagaggaccctgcggccttccgcagtgtttgtgtccctgggtacttgagattagggagtggtgatgactcttaacgagcatgctgccttcaagcatctgtttaacaaagcacatcttgcaccgcccttaatccatttaaccctgagtggacacagcacatgtttcagagagcacagggttgggggtaaggtcacagatcaacaggatcccaaggcagaagaatttatcttagtacagaacaaaatgaaaagtctcccatgtctacttctttctacacagacacggcaaccatccgatttctcaatcttttccccgcctttcccccctttctattccacaaaaccaccattgtcatcatggcctgttctcaatgagctgttgagtacacctcccagacggggtggtggccgggcagaggggctcctcacttcccagtaggggcggccgggcagaggcgcccctcacctcccggacggggcggctggccgggcggggggctgacccccccacctccctcccggacggggcggtggccgggcagaggggctcctcacttcccagtaggggtggccgggcagaggcgcccctcacctcctggacggggtggctggccgggcggggggctgacccccccacctccctcccggatggggtggctgccgggcggagacgctcctcacttcccagactgggtggctgccggtcggagaggctcctcacttctcagacggggcggttgccgggcagagggtctcctcacttctcagacggggcggccgggcagagatgctcctcacctcccagacggggtcgcagccgggcagaggtgctcctcacatcccagacggggcggcggggcagaggcgctccccacatcttagacgatgggcggccgggcagggacgctcctcacttcctagatgtgatggcggccgggaagaggtgctcctcacttcctaggtgggatggcggccgggcggagacgctcctcactttccagactgggcagccaggcagaggggctcctcacatcccagacgatgggcggccaggcagagacactcctcacttcccagacggggtggcagccgggcagaggctgcaatctcggcactttgggaggccaaggcaggcggctgggaggtggaggttgtagcgagccgagatcacgccactgcactccagcctgggcaccattgagcactgagtgaaggagactccgtctgcaatcccggcacctcgggaggctgaggctggcggattacttgcggttaggggctggagaccggcctggccaacacagcgaaaccccgtctccaccaaaaccagtcaggcgtggcggcgcgagcctgcaatcgcaggcactaggcaggctgagtcaggagaatcaggcagggaggttgcagtgagccgagatggcagcagtgcagtccagcttcggctcagcatgagagggagaccgtggaaagagagggagagggagaccgtggggagaggggagaggggagaggggagagggagagggagaggtgtaagttcattttttgcatatagatatccagtggtcccagcaacatttgttgaaaattgccttcgcacctttgccaaaaatcaaatgaccataaaaataagtatatacttttggactctattttgttctattgatctatgcatctgttttatgctaatatcacactgtctggacttctttggctttatagtaagttttgaaataggtagtgtaagtcattcaactttgttaactttttctaaagtgctttaactgttctaggtcatttgtatttccaattgtatcagcttgccaatttctacaaaaaaaaaaaaaaaaaaagccagctgagattttgatagcaattggatggaacctacagatcaatttaaggagaattgctgtctaacaatattgaatcttcccgttcatgaataagaaatatcttttcattcatttaaatcttctctaatttctcccccaaaatttttataggttttctgtgaataacatttctttcattgaatttttcttgaatttctttcattcttttttttttattattttttttgttcaagtattttgttccttttgaataaagaagcctggtgtggatggagagctgatccagcccttctgtggctctcctgtttccaggatctcgttattacaattttggctggtccagctatcggttgcatgcaccctactgggactaaaacctcaggctagcccagctgtgagctttccccattcattttctaccaagttcactacttttgctgataagatcattaggcatgtgcttctgctctgctctgaatcaagccagccttctccatcagtggagctgctggctttcacggctagccctgccttaggaaactcccctgccgacgggctggggtaagaatggagctgcctctgctggaaggacgctctcttccacgcatcttacccaaaactctagcagcttttcctaaagaaaagcttgccagtttgttgtttgtcttaagatgattttcagagtcctgaaatggttgcttttgaaaactttgttcacttacataatttttttgggtgggagagaatttgtcaacttccttattatgccatagacaaaagttgctctatattttatatatatacacatatggaatggggtgggggagagatagagagagagagagagagtgtcttgcttggtcacctagactggattgcagtggtgtgatcacggctcattgcagccttgacctcctgggctcaagagatcttcccacttcagcttcctgagtagctgggactacagacacgcactaccatgcccagctaattaaaaaaaaattgttacccaggctggtgttgtactcctgggctcaagcagtcttcctgccccgacttctcaaaatgctgggattataggtgtgagccacgatgcccagctctaaaatgtaattgatatggagaccttgactaccatgaatttcaccagtggaaatctgtttccattagtcatcatgccattaacaatccactgattttactaatatcccattgctatattctccctggtaattaacaaagtgctgctgtcatggagacagaaagagcagggtgcctctggaatgtgggcagtattccggattggagaaccaccagctaactatccaggaagacacatcacctgttttaatactagctgcttaacctgtgtctctcacacacacatataccataccacagtctatactgaagtattttctttttttttgagacggagtctcgcgctgttgcctgggctggagcgcaatggcgcgatctcggctcactgcaacctccgcctcctaggttcaagcgattcccctgcctcagccttctgagtaactggaattacaggcgcctgccaccacgcctggcgaattttttgtatttttagtagagacggggtttcactatgtttgccaggctggtctccaattcctgacctcatgatctgcccgcctgggcctcccaaagtgctgggatacaggcgtgagccacagcgcctggcctactgaagtgttttcaagctatttaactggattttcacctttagtcaaacctcactcagttaatgtctccagtttgagtaattgtcagcacactgaagtaaaggagaattccgtgggaattgcagtccctgagaggaaacagatgccaaattcaaagaagggctctttgggctgcttgggcccatagccccagaagctgaaagagagctggcactctcctggaaaccaatgaggcccttaaacttgccagccttcttcagagctggagcctgggggctggagacaggaaggggagggctcctggaggagaaggggtagaaagtgcaaccaagaactgaaagggagaaaattcactgttctgtgtgtacatcatagtggggggtgtagtgaggatagaccatttgagtactaccagtttgttttaaaagaaaatacattaaacaaggctcgcataaatgtgatttaagagagtaatctattaatgtggtccagcctgggttttgattccttcattaccaaagtgtggacataaagtaaattttccgtcactgtattatcataatacaaatatagggaagaacttaggaaatcaaaggaaacaaattgttaattttttaatgacagcagaggagagagagagagagagagagagagagagagagagaaaggtcctgaggcaaccagggaacagcttgtcaatttctacaaaaaaaaaaaaaaaacagtcaagggatattgctggaatcggatagaatctatagatcaatttggagagaactgctatctcacaatgttgaatcttcctatctacaaataagaattatctttttattcatttagaacttcttcaatttctcgaaaaatgtttataggttttcagtgtattggtcttgaatttattttgttaaaatgtttttcctaaatattttattctttttgaataaaactgagaaatttatagttctgggcactgcctgtgtggatggggcctgaactgcactggtttgacttaatagatttccctggttgttactgagttgaacttgttcctatgttgtgtccttagttttggaacccttgaagtttttcctcttaacagtaagccaaaaacctttgttttaactgaagtaccacattgcctttaaaaatagttgctaaaggtctccaagacttggatgaagagtgaggaatctggagttctagttaaatagtgacagaaagctgctggaaggagtgagagcttatgaagcagtctgatgatcttgtgccaagtttggctgaattggttaaactcagggtgtttgagctggaaaaaaggtccaggagatcatctaatatcttttttttttttttttttttttgagacggagtcttgctctgtcacccaagctggagtgcagtggcgcaataatctaggctcactgcaacctccgcctcctgggttcaggccattctcctgcctcagcctcccgagtagctgggactacaggtgcttgccaccacgcgcggctcattttttgtatttttaatagagacagggtttcactgtgttagccaggatggtcttgataatttcttgaactcagtgcagcatcccctgggaacttgttaaatcgaagtatctcagccccactccagacctactgcatcagaatctgcactggaaccggatacccaggagatttgtacatgtgaaagtggagaagcccttggctgggcgtagtggctcactcctataatcctggcactttgggagactgaggtgagcagactgcctgagcttaggagattgagacaagcttggacaacgtggcaaaaccctgtctctactaaaaatacaaaaaattagccgggcatggtggcacacacctgtagtcccagctactcccggaggctgaagtgggaggatcccttgaacccgggaggcggaggatgcggggagccgatatcgtgacactgcactccagcctgggcaacagagagagattgtctgaaaaaaaaaaaaaaaaaaaagttgagaaaccctgcagtaattcttatctctctaccttgtgcataattaaatcttagttatcaaatgtgtgaatgctaaagggtcatcttccatctaccttaatgttatggtattattaatcaaccttagatcatgttagcatttttcctagtgctgttctcacattgtgcacacctctcacagagaaccataacatcttttccacctttgccaggacttgctgtgcttgcaggtggattttgggggaaaagtggaaggtgctgtattgatccctactaaacttactctggttttattttggccactcttgagattcccctaattccatgtacttttcacacatttgatgcctttttttttgaccgagtctggctctgtcgcccaggctggagtgcagtggcgcgatcttggatcactgcaagctccacctcccgggttcatgccattctcctgcctcagcctcctgagtagctgggaccacaggcgcccgccaccccgcccggctaattttttatatttttagtagagacggggtttcaccgtgttagccaggatggtcttgatatcctgacctcgtgatccgcccgcctcggcctcccaaagtgctgggattacaggcgtgagccactgtgccccgccatttgacgcctttttaataccattatctaagtcaggatttaaaatattgaacaaggaagtgttgggtacacagcatggaaaacccagttctctgctcctcaattcggtatactttatgttgcttgcgtcctttttaaagaccacattttgggaaaatatactccttcccaggttttccccatgcgattgcacctgtgcggtgaatgagcatgtgctgccaccacaggaaattgattcacatggagacctttgggatggccagcagaagagactgagaagttgcttgagggaaaccacgagtctgtattatgatgtatgatgtatgtatgtagcatgatatatgtagcgtggagaccaaaagaaacagggtttaagaaagagagaaagatcatttttgacaaaagctgctgcaagttcaagtgtactgaaagtaaactgcttgttgggtttgccaagatggaagctatggagaccttgcaaagggcattctttttttttttttttttttcccgagacagagactcgctctgttgccaggctggagtgcagtggcctgatcccagctcactgcagcctccacctcctgggttcaagtgattctcctgcctcagcctcccgagtagcggcgactacagtgcgtgccaccacgcccggctaatttttttgtatttttagtagaaatggggtttcaccatgttagccaggatggtctcgatctcctgacctcgtgatccacctgcctcggcctcccaaagtgctggcatgagccaccgcacccagccggcattcttagtgattaaaaggaacagcttctcagttggaactgagtgaagagagaatgtgaggcaaagaattggagacaatgaagacaattcttgttatatacagccttaatctaggaatagccttttgaaaaagagaaaaactaccaggttcaaagtatatgtgcttataaagaggtggcttcatttcaggggaaaaatggtactagaactgagaaaatatagtgttgtatcaatcccagtgagaatgacaccaaaataatttaactctgtgcacctgtgatcagagtgttttgttgttaaatatatttgtctgccattggtgcataaggtaaaacgtaactcaaatgatttctttgtctgtaagatgaccctttagatatgtactggaataaaagtagctctaatcctgtggatccagccaccttggggtcttcgtgctggtgttctgttagagatggtgatgcatttgacatctcaagtgccaaatgatttgatcggaggtactggtcactggacatttttaaggacaatttcttattgcagttaccactaggcacatgcaggaccagtcatgtaaattgaggagccagtgcaaagtgaaaatgtgggactctttctttaaattattaaacatttcaacagtttcagcatagcactaaacgaaaagtgattgtgcaggtcacatactcatgaaatggtcctcagcacatgccccgcgatagtgaaacaaggatgctaaagttttaaagcataagcaagtaaaatctgtacaatcaagtgcagaagtggcagaagaaagggaaagaaataactaagaccttcagggttttgtagaaaagttcatggcctttggaagtgtttgggctggtcagaaaactggtgttttaagtatttaaaggatataaatattgtaagtgtcataaatgatataagcaaaatttaatatagctgcattttaatccaacagtgttgtcattattcaacttaaaggctgcatttgcttttttatttttcacctgtaaggatttaggagagaggtacagtgacttctcaggacaatgggaatgatatgaaattttaaatgtgttgcatattgtggtgctattgtgttttgcgtaagtgcaataataattttaatcaggtagaacatttaaattgttgtccttggaaacaaaagagaaaactgcttcacgatgaatgaattaaagttcttttctctgccaactaaacttgtatactaaatgaaaaatcacagagtcattgaatatgagcatttaaatgaaccattgtgagaggagtaagtggatactgataacatactgtttttctgcagaaaatatttgtggttaacttgttcataccatgtgtttctcttacaatcaaaacctctgtctttttcaaggacaccttgagcacattgctagggaaatggaactcttaacaaaaccctgctaaatccttctgcttaccaccccctcttgttttctgattaaacttctcttcatcgtctcacatgaggggggaaaagaaatcaacttgttaaatgccagactcccaggagtttggatttgacttttctctcactgtttgtatggggtctttattccctccctccctccctctctccctcccttccttctctctctttttctctctctctctctgttctctttctttctttcaatatctctccctgtctttctttctcaccacccacatattttcttgtcctgtgttggaaagggctttggtccttgcctggtggaatcgctagaatatcttaaagcttttcttttactaacagccatcaatgattactttggtttagtccaaaaaccaagaatttgcttttgaaggagggggttattctccccttagtgtttctgcatcaagctgaaagagctccctgcttagagtaagtcaagtcaccttccttaaaaaaaaatactcccaggtgttagagatctctttattagagtcataaaataactactggttattttaaatagttccctttggaaatgagagtctcgttttacattaaacaggcaagactttgatatatttcacatatttaagccttagctttgattttttagtcatactgagaatactggtctttgagacacaaaatgagttcatttagtagtggtttaaaataatttttaacttataacaaataactggaaacagaatttctttaagcaggggactcctgttatgggaacatgtttggtggcaggtttcccaggggagaggatccgggaataaggaagcacttattgtagggtgccattgccacttgctgatggctcagaagtggagctgaggcctcttggaactatgtagtattgggaacgcatgttcatgtatacttaattttaaaacacacctactttatgacacgtggctatatttgtattgttttctggggaaataaaaggtttgagtgaagatgaatttcgccacaacttgtaaacagcccccctgaacctgttggggatgcattgctccaaatcatttcagtttaatccttcccccatctccacccctcacacctttcctatgtgttcacagccctcagcattcacggagaacatgtccctgaaaacgtgctggagcatcaagtgcaagaaatcagataataattatgtttgaagagggtgattttattccccaggagaaataaaacctcgctcaggcaacagggggtttattgaggaccggggctggaggcagctgctgccaggcccacgccaggtcattgggccttcgcctgagctcttggcttgagcccctcccactcaccttcacaatccatgtgggtgagaggtcatgggcctcctggctgccttgttcctgagatgcacgggatcctggaagaggaggtagggcaaggacactagcagagtcacctcaccaccaagtggaattcttcctctgcccttaactccttgcaccttccctaccagcgttttgttttgttttttttgcccaggctggagtgcagtggcacgatcttggctcactgcaatgtccgcctcctgggttcaagtgattctcctgcctcaatctcccgattaggtgggactacaggtgcttcaccacgtctggctaattttttgtatttttagtagagatgaggttcaccatcatctcctgatggtggtctcgaactcctgacctcaagtgattcgcctgcctcagcctccgaacgtgctgagattacaggcatgagccaccaccctggcccctagcaggtttctttacctttatggtcccaattaatccctttggcagagcttgtggacctattctcagcatggtttttgttgctgttttttttagagacaaagtctcactgtctcccaggctggagtgcggtggcgaaatcatagctctgcaacctcgagctcctaggctcaagcgatcctcttgcctcagtctccccagaagctgggattacagacctgagcctccgtgtccagcctcttgacatatttttaaatgcataaagaatatattagacagcaggcactgtggctcacgcctgtaatctcagcagtttgggaggctgagatggaaggattgtttgaggccaggagtccgaccagcctgggcaacattgagagactctgtctctacgagaaaaataaataaataaaatcaaccaggcatggtggcatgcaccctagccccaggtactcgggaggctgaggtaggaggatcgcttgagcctgggagttcgaggtggcagtgagctgtgattgcaccgctgcactccagcctgagcaacagaataaaaacctatctccaaaaaataaaataataataataataaataattttttaaaacaaaaaaagttagaaagaaagccaagtatgttgaaattcagtgttacccatgcatggctagctccctctcattttttacataacccgttcagtgttacctcctgaggtgctttcccttctcggcttacgtgacaattaaaagattgtgatttacaaacatgcagttaacttacaggggcataagtactcagtgtggcaaagccaacagcagcaagaacaataagatcaaatgagaaaagggcagggaggacggaggagacgaagggaggaagggaagggggaacgggcgaatcgtgctatgaggccatgccttgacgagcccctgagctgagctgaggtcagcctttcctttaggcctctcactgtgcacatttttctgggctaagagtatttcttctatttcgaggtatgtgcttttcatacccagtggcccctaaaggccaacccacttcttcttctaaaacttaagagaaacagagattcaaatatatgagctataatcatgaaagactaattatatttgaggaaacttagtgataccccctgataatatgaacataataagagcagctatttgttgagatcttaatacattgtatgaaaccctttacctacatgatctcattgattgctcacaaaaacgcctgggtgccgtgcttctcatcattcatatagagagactgggaggtaaagccctcggccaaggccacactgatggcagccagtagacctggaattcacactgggggctgcctgacttgaagcctgtgttcttcctctttatcaatgccatctttcctaggcactagcgatttcagagtttggattccaacaaaatccaaatacatattgatataaaaatacataattagaattaacatttccatttgaaacctggacacacaggttagacactcaatatgctatatttgaatagaatttactgtcttgaaataattccgcatgatgtaggtttactcacatcctgaggagtgggccaggggaaggaagagctggttgccatgggcatcggctggaagcaaagccatcctccaggatcctctggcttcctgagccaagatggcgtggagcatcatctgtttctcttccaactcatcttatggtggaagttgtgaaggagcaactttcctgccagtgctccaccccttattcacccattcctattctggaagatagtgataaaatctgattcttaagaattggaaggttaacctatgaagggatagatttaaagacttgatgaactttgattttacctgcaatacctcaaccaggacttgttactgctaccaaaattcccacttattatgacatttttgtcatctttctgaagtcattacaggacattttatagacctttctttttttagatgaaagggtcaacttcagtccgacgcacaaagaagcaaagaataataatttttctctctatttctatttgcttcttttgtccaaaaagatcaaagaattaccaaattatttctgtccacccttgcgcacactgaatggagaaaagtttttctcacttcattttctaaatagagagatcatggtgggcagatttagctggtagtttactaaggtaaaattaagaatcacagcatctcagaaaaaaaggactcatagagatactcatttaatagctgaggaaattgaggctgagaatttgacttgcccaaagacacagagtcggcagcaggctgagtctagattttaggtgctcggtcccgtgcgcctgtgtggtccctgagggagaggcagagggatctccttccttcacttactcattcttccactcaggcattatcgtcattcacgcgagccagacactgtcctagggccgtttttgtttttattttttggaaaaggatagtgggggagaagaactggggagagacaggtcagtaaattcatgatctctgtatgaatgataagtgcagtggggcatgctgagctgaggtacaaccaaagacattcgcctggggttcaggaaagatctggacttggctggaaggatgaatagggcgtgaatggatctatgaaaggtacaaagggaaggaaattgaaatggatctaaagagcatggagaggagtcagtgaaagacgttgtatctgttcctgtctgaatgcatgcccttctatttctgcctagatgatgcctgctcatttctcttgctctagaacatctcctcaaatctgttttcaaatattgctgcagttttaatgttatgtttatccacatcggtgagaagaagcttctctttccttcttggttgtgagaaccctggggtcaggaaaagctcggtcattcatcatagtgccctgggaggtgcctggcacagtgctgcacacctaagaggtgcttgttaaaagtttattgaccttaatcaaacattcattctcagccgctttttctgacgcatatgtgtaaatcatagatatgttactgaataggaatccagccaccctcctaaaattcatgtcattagaataccttaatcttattaacctggaatactatgttattagaataccttgatattattatcctggaatattattaaatagttccagaatttttcactaaatcatgctatttgtagttgttagaggtgctgtttttattgctcagtcaggtgactaccaggtttcaaagaaagtgctgattaacagggtagcttctttctaataccagacttctctgatcaaattatagatgttcacttgggcgaatgggtaagattaagggtaaaataggccaggagcggtggctcacgcctgtaatcccagcactttgggaggctgaggcgggcggatcaggaagtcaggagatcgagaccatcctggctaacgtggtgaaaccccatctctactaaaaatacaaaaaattagccgggcttggtggcgggtgcctatagtcccagctactctggaggctgagacaggagaatggcatgaacccgggaggtggagcttgcagtgagcggagatcgtgccactgcactacagcctgggcgacagagcaagactcttgtctcaaaaaaaaaaaaaaaaaaaaaagaagaagaagaagaaaaaaagagtaaaataaatggaaaacaaaatggatttgtatgttttttaaagatcacaaatttctcaatttagattgagaaatttagaaacttaaattcctacttttccaaatttctccatggattgaataagtagctttgtttttcaaaataaaaactcccaacaccagaagccaccctgattattcaaccctataaaatattcatattctcttgtttcattctggaaaaaaatgatctggaaatattgcctcagatcctgtagctaagaattgcaaatcattttcttttcagaacatcaccttgattttgagtatggatcaagcaaatacaacattttctagaactcagaaacttttttttttccaaaatggaaaaaaaacctcatacttctcttacacacaaatgaattaagactttgaatgcttggcttctgaatcatttgaaaaatattggcaaagaagttgttgtaacaagtctcaggcctagccaacattttagatgctttggttttaagacagggaagatatattctgctgggaagaaatccaaaaacctctaaaaatgaattataaactatctggaagtgtctcagctgtggtaattatggtagtagcattgttgtctgccaccttggtggccgtttttcacctaatgtttataagagaatcttccagtaggttaacatgatcctgaaatgcacttcaaaaggccaagtgtacagaaagggtttaaaaacagtaactgctagtgagtgagaaggaatttatttcatgctcgatggagtttggctttataaattttttagctgctggttaaatccacagtagaggaatgattccattgtgtgtcctgagtggaagaaaaaagtaaaaattagtatcacagtaacagtaactgaagtgaataacatttctcaacaaaaaacatgcagactaatttattaagtccttgatgaagtagtgggaaaactgtgtcacgccacatagctacagtcctcgttctacccttgatttttatgtgtaaaaccaaacatagcttcttggtactgtcctgatcctaatgctccttctcactctctgatttcctatctcacctcctgctcaatggtcatgtggttcccctttattgaactatttcagtagtctgcaatgagtcagcaaccttagggactttaaaaaaaattctatttaccagtctgggcaaaaagagtgaaaccccatctaaaaaaaaaataaaaattctgtttaaaacatgcttgctctagtacacatttctaaccccacagccccaccgccgctttttttttttttttttttttttttctgagacagaatctcactctgttgcccaggctggagtgcagtggcgtgatctcagctcactgcaacctccgcttctcaactttaagtgattctcctgcctcagcctcccgagtagctggattacaggcatgtgccaccatgccccactaattttttttgtaattttagtagagatggagttttaccatggtggccaggctggtctcgaactcctgacctcaagtgatccgcccgcctcggcctcccgaagtgctgggattacaggcgtgagccattgcgcccggccccaaccttctttcatcttctttcatcttggaacagatgtggttctttgcaacaaaaggatagtgattaactatgaaaagggagtaaatataatatgtaagacatcatttttagtgaatatttttttccaaatattagcttatctgagaaggaagatttagttttagtgaaagacaacccaaatatttttatgaaattaattatttgaaggttttacttgcataggcatgctaatgaagtatatttcttctaaatatactttcaataaaaaagcaatctttctttttattaaaagtatatttagggcccggcgcggtggctcaagcctgtaatcccagcactttgggaggccgagacgagtggagcacttgaggtcagaagatcaagaccagcctgaccaacatggtgaaactccgtctctattaaaaatacaaaaattagctgggcgtggtggtgcgcatgtgtaatcccagctactcaggaggctgaggcaggagaatcgcttgaacccgggaggtggaggttgcagtgagccaagatcgtgccactgcactccagcctgggcgacagagactatgtctcaaaaaaaaaaaaaatgtatatatatatatatttagaacagccaggtaagaaacctgtctagtgcaaagaactacctgatgctgattactataactgagatattattctccaaaaacagttaaatttatgttcatgaggtttgagctgctttttctcagtggctcagggcaaagactccagcatacacagtgtgtggtgcctccatgactccctggccccctcccctcctcaataacacaagaccctgcagttactcagattgggaggtagtggggagttcttttgatgtcctgcaactggtgggggtgaataaggagcaagtgggaacattcgttaactggtgaagtatttgttgttaatagagaaatgcattgtgaagtcagttcttgtaaccttggtttctttttcttgcttgactagtctttgtgaagggaatggatagagttgattgtactgtaaatctaattgcatgtatgtaatacagagccaaaaaatgtcattttagctgtttggacaaaacgctatagtttaaaagcatattttatttaaaatgattagctgataagagaaatttgaatcagaatacctgaatattatggtcataaaggatggaggaaattattgtttatcttagtactaaatagaataaacgtcagcccctgctacaggtaagtaccacacataagaatgtatgtgttactgtaggagctacattattacataaaatataactgtctaactactggttgatgaaaataataaattggggagctgcatgattaaacacaatgactcatctggttccgcataaagcatttttttttcttattttatattaaaaacaaacgaagtccctttacagggatatgataaaaataagcatctttaagttaaaaatgaaaataaatatattaaacatagtatatgatgtaagttcatgctatgtttcaaaattaagaataatgctttagagtacaaatattaaataactattttatcttgagagggtaaggacttattgacagaatggggtccttctatttgacagaattactaataggtagttctgttttatgtaaaaagtttttgaaagactacctaatgtatttttttaatagatgcatggtaaggtttttagtgtagcaagtgttagagaaataaccatttttgtttgataatttaaaatttaaaatatttataatggaaaagatcattgaacgtattaggcagtgcctaaaaaataacagtggaagccatgaattccttctgtgttactaaaattacactgtgctattttaaatttcactgaaaaataaacatttcagtaatggtatttctatatggtttttacaaagaaaagattatattctgtgatcttttaagatcaagctgtactatgttagagaaacgccactaagctgagaccctcgcagtatgctctcagctcagtgtccatgcctggagaatgtctcttcaacatcgcgtacaccattgtttctagatctttacagaatcttcactgctgctatccccttttaccaagataaagttaaatctccaaagaaccgaatggaggtacttttctcacagtcacccagaaattgtttcctgaatagtttggacctggtactgatcttggctgcttaaagataaaatcagctgagacaaaggaacagtacaaaggcaaagatcaataatgacttgaaaagcattttgaaaactgtatctttgtgttctaaaattttattcagcaaagaaaacaggagtaaagaaagagaagagagagacaaaaaaaatcctagataattatagaaaagaccttgtaaatactaccagagtcaactggaccaaagtgaggacagaataaatgcccttctttcaagtgaaagacgtttggattgcattgataaatatatgcattggatcatttgaaacttcccttaaggcctgtttcacaacattttattgtaaacattttcaatcagaaaagtggaaagaattgtacagtgaacacccatactctcgccttggtttttttttgttgttgtttttgaggctcagtctcgctctattgtccaggctggagtgcagtggcacaatctccacagcggctgaactgatttacactcccaccgacagtatataagcattcccttttctccacagcttctccagtatctgttgttttttgactttttaataatagacattctgactagtgtgagatggcatatcattggaagccagcttactttgtggtgcatttcgaagtgaattggagacataagtagactttactcctaaacatttccgcatgtacattggtatttatgattcttttatttatttatttatttttgaggtagaacgtgcacatactaagatacacggatctacccaaatcttacttaggtgtactcattctatgatttttcacaattgcatctgcctgtgaaacccaaagctttatcgagatatgaacgtattaccctagaaagttcctctgtcgtttcatagtcaatccccaccccctgcaacaatggtttgacttttctccgtagatgaattttgcttctcccagaatttcatatagatgaaaccatgctgcgtatacggtgtttgtgtaaggattccttcattcagcacatagactttcaatctccttttgattcacctaccaagtgggatggggtaagctcattctttggatttcaagtggctcagctgatttggtaaattttcactttcaggcctgtttcctgccattctcaatcttgccagcaatgctcacatcagcaccaatgccacctgtggcgagaaggggccggagatgttctgcaaacttgtggagcatgtgccaggtcggcccgtccgaaacccacagtgccggatctgtgatggcaacagcgcaaaccccagaggcaagtgtcgcgcctttatttctgaaattcccatgggaatgtacactttgtgaaatgaggactgagacttctgttaggaagccataaacattgtgttcaccttcactgctctttgtttccactagcattacggtttagaacttaagaaatttaaagcaacagccgagaggaattcatgttttttattttctttcaacagaacgccatccaatatcacatgccatagatggcaccaataactggtggcaaagtcccagcattcagaatgggagagaatatcactgggtcacaatcactctggacttaagacaggtaggtgagcccagaaccattgaagagtgtctacaggctgctgagctgtggtcttctgatgacctttgggaaagtctggcttctttctgaacacatttacattctaatctcactatttccaccaggtgaaggcaagtggtatacagaaggagtccctggtgccatttcttgtcactttcatcattcccaggtgtcttcagggagatgggtgaaattgcttccatatggttgatgttcttcgaagctgtgtcaacagggcacactcatccatccagggtatcatgtcaggctgtttgctggctgccaacagatgcatggggagggagagggggaaaacacatgtatttcctaacttttagcttactgtcttgctaatgtcattgagtaagttattgtataaggattatataaggctagaagaaaaaaagacaaaacggtgttaaacctcttgactgtgtctcccctgccacatgtagtctgtctgggccaggtaagctggagttgcccaatagtaacttaagcagtgccttcagcatgagtggggagagggaaggtatgactggctccagccacacctgcatctccttaccttgcttcaagtccacataggaggatggagagaaatatgagatgagccccagttgccctgatgttcctgggaaagaaaaacaaaaggagtctgagtggaaggaatgaaaaagagagatggcaggtgttttggagctgttgtcctggttctgttttgagcttttcagaaaagccatcgcattaattcttatttatttccattcagtttctcttgtgttagaactcataagtttcatgtaaaatatgagatcggttaaaagacacaagtaattgtgatgtgcattgtaggatttaaataggaattatagagatttaatgacaatcagaattctttgaataagtgatagttttaaaatgtgcaggaatttttttttattttttatttttattttttattttttgagacaaagtctcactctgtcgtcaggctggagtgcagtggcgcgatctcggcacactgcaacttccgcctccccggttcaagcgattctcctgcctcagcctcccgattagctgggactacaggctcctgtcgccatgcctggttaatttttttgtgtttttagtagacaggatttcactatgttggccaggatggtctcatctcttgacctcgtgatccgcctgccttggcctcccaaagtgctgggattacaggagtgagccaccagacctggccaaatgtgcaggattttaagaagacaaggtgatacttcatatattgatgtacaaggaacttgtgttctgtaataattacagcaaataaggtagcaagatgtgcagctcaggagacattttccaagttcaggttcacagtattatgaaagtaaaataacacttttaatagctttcaggtataagacatgaattaatgtgacactccttaatattttcaaatccccttaaagaaaaagagaaaagagccaggtgcggtggctcacgcctgtaatcccggcactttgggaggccaaggcgggtggatcacgaggtcaggagatcgagaccatcctggctaacacggtgaaaccccgtctttactaaaaatacaaaaaattagctgggcgtggtggcaggcgcctgtagtcccagctactcgggaggctgaggcaggagaatggcgtgaacccaggaggcagaggttgcagtgagccgagatcacaccactgcactccagcctgggcgacagagcgagactctgtctcaaaaaaaataaaataaaataaaataaaataaaaaacaaaaaaaaataaaaagagaaaagagcttctttgaaaagagcttctttgttgttgtgttttgttttttgttttttttttttttttgagacggagtttcactcttattacccaggctggagtgcagtggctggatcttggctcactgcaacctctgcctcccgggttcacgcgattctcctgcctcagcctcctgagtagctgggattacaggagtgtggtctcgaacttctgatctcaggtgatccaccggcctcggcttcccaaagtgccgggattagaggcatgagcaccacgtccagccaagagcttctttttaaccctggcctttgtgtttatctcagtggtaagaatggttctctggaagatttcggtttttcccatcacctttctgacatattttcctttttctaaaggaaaaagtaaaactgtgttcattattaagaatgtgatattatatgagtttggccaaattaagacctggacattttacatatagatttcaaacctctgtaagtctatcctttgtcttgaaatttgtcatgcttgacttcatcctgaagggatggactaagttagtctgaggaattccagaaggcagtctccattttagatgtttaaggcatttttaaaaaataagcatagacagccaggtgcagtggctcatgcctgtaatcccagcactttcggaggctgaggtgggcggatcacgaggtcaggagatcgagaccatcctggctaacacagtgaaatcccgtctctactaaaaaagatacaaaaaaatgagccaggcgtggtggtgggcacctgtagtcccagctactcgggaggctgaggcaggagaatggcgtgaacccaggaggcggagcttgcagtgagccgagactgcaccactgcactccagcctgggcgacagagcgagactccgtctcaaaaaaaaaaaaaaaaaaaagaaaagaacagaaaaaaccatagacatatagttataggctgctttaggtaatttttagtgttttaggatatgcttttaaaataagatcacttaaaataattagtattcagaaatttctttaccatttacacagtataaaaattctgctgtgctttgtttttttttaaacaaagcacattatgcttatatctgatcaagcctttctcagatttatttatttattgagcctttttattacaaacacttttgcatatgtagaaagcatattacagtgaatacacatatacccacccttgagatttggggattttaaaacactggaccatgttcgtttcagtgaattgcagtcatcacaacattttgccagtccttcagtttgtgtcttcaaaaaataaagacgtttgttctgattagataccataccatttcagcctccttgggcaaaattaacagtaatttcttaataactcttttcccatccacattcaattttcccagtttatcaactagtatcttttactgcttttttttttttttaaccaggatccagtaaggaccacttgttgcattggattgctatgcttcttaaatctcttctcatctgaattgtccttcacttaaaaaaaatgctattgaatatatgaatagaccagaccagttgtcctgtagaatatgccacattctggatttgtcagattgtttcttcatggttttatttaacatattcttctgtgctctctatttcctatacaccaaattcagctctagagacctgattagattccagttaagtgtttttcagaagaccacatcaccagccatcctctcacctcacatcaggaggcacccagggctggttgtcccactagtagtggtgctaaatttgaattctctctgggtgttaaaagtcaggtttcttccttgtaatgttacttccttttttctgtcccatatccccattgtttcttagatctcactgacattcagatctacagcatggctacaccttctgatgacttttttttaccttgccaaaatctgcatgtttccttagccattagccaactaccagttgttttctagactatatactccatgagggatgggaccacagctgtcttctacttttctttctctgccctttcctttcctggttagtatttatagagagatgtcttattcacttctgcacacccagacattggcacagttcaggcactgagtcaataattgcattatggatcagtactttttttttttttttaaatggagcctcactctgtcgcccaggctggagtgcattggcgtgatctcggctcactgcaacctctgcctcccaggttcaagagattctcccaccccatcctcccaagtggctgggactacaggcacacaccactgtacccagctatttttgtatttttagtagagacgtggtttcatcatgttgcccaggctggccttgaactcctgacctcaagtgatctgcctgcctcggcctcccaaagtgctggaattaccggcgtaagccaccgcgcccagcctagtgctttctttcttccgttattttttttttgagacggagtttcgctcttgtttcccagactggagggcaatggcgcgatctcggctcactgcaacctccgcctcccagggttcaagcgattctcctgcctcagccttctgagtagctgggattacaggcatgcaccaccatgcccggctaattttgtatttttagtagagacagggtttctccatgttggtcaggctggcctcgaactcccaacctcaggtgacctgcccaccttggcctcccaaaatgccgggatcacaggtgtgagccaccgcgcctgaccttgtgcttttttaaaaattttttttaacttcccccccctcctcttttcttgttcacagtctgaatagaaaagaacaaggaacaaaccttttggctgctttgtttcagtactataaaaatgtaaaatctaaagtatagatttctaaagtaaaattacaggtagaccttagtcttatcaagagttgtaaaacttaatattataaatgtgtttgtgtaacttggtaaatatcagctcttgaggttttatgaccaaattagctgcattctgtgttggcaaatgctaacattgatcctgttcctgattctctaattgatgacagctgtcagaattacagcatttttttttttttttttttttttttttttttttttttgcctctatgtattaggtttggttatctgcaagataaactaaagaaaagattaaaaagtagtcttatcagaagtccataaatgttgtatggtttgcaataaggtttaactactgtttattttagtaatgtattacaagaggaataatgagatttacttctttgctttttaaaaataatgtctactattcacttctttcattgattcacagtattttagaagatacactgtcagatatctagcagtatcttacttttaaaaaattcataggaatttcatgtgtgtgatatttttaagaaaagtaaagcataataatcatcaactttaacaaatacaaaattaacatatatgttgtggtctccattaataaaatgctgctcaccaagtggtttaggatctcatatatcaatactaccactgaacagtgatcttttttgacaacttaaaatttaagagaaattattctgaaagagcatgcacatttcatgaatcttgcatttataattgtccaaaatcctataggttccacgaattacaggaaaatttattccctatggtagcatttctcagtagaagaacatgaagatttcctgtttgagaaccactattttaaaagttaatacactgttgagatgaaaagatgttcatcgtcattattcaatagggaagtgaaaatcaaaccacaataagataccccttcacacccattaggattgctatattgaaagagttggaaaataataagtgttggtgaggatgtgaagaaaatggaaccctgtgcactgtgggtggaaatgtaaaatggcacagtgttatgaaaaacagtgtggttgttctggccgggcgtggtggctcatgtctgtaatcccagcactttgggaggccgaggaggtcagatcacgaggtcaggagattgagaccatctcggccaacatggtgaaaccctgtctctactaaaatacaaaaaattagccgggcgtggtggccaatgcctataatcccagctacttgggaggctgaggcaggggaatagcttgaacccgggaggtggaggttgcagtgagctgagatcacgccactgcactccagcctggcgacagagcaagactccttctcataaacacacacacacacacacacacacacaaccagtatggttgttcctcagaaataaacatagaattacagcaattccactactagggaatgccgtaaagaatttaaagtagggactcaaacagatgccagtgttcagagcagcattattcacagtagccaggaggtggaagcaacccagatgtccatcaaccatcaacaggtgaatggatagtcaaaacatggtatgtgcatacagtagaatcttagccttaaaaaggaatgaaattttgacacataccacagcatgtatgtaccctggaaacattacgctaaatgaaataagccacacacaaaagaagaaatattatatgaatcaatttggatgaagtacctggagaagtcagttcatagagacagaaagtggagcggggtggttgccaggagctgggaggagagagaatggggagttgttgtttaatgggtgcacagtttaggttcggaagttctggagatagatggtagtgatcattgcacaacagtgtgaatatacttaatgccactgaattctacacttaaacatggctaaagtcgtggtttttatgttacgtatatttttctacaacttaaaaaagttaatacactgtgaaatatttggtgtattatgtcagccagggtcagtcaggaatatggaagccacaccagtcatttaaaggcacaaatttagtgtgaggaattggtttgacagtgtgggagagctgggagagggagcaggaaggtaacttgggggtagtagtggtggaggaggcagcaacgcaggagggtgtggttatagcacctagagcctgggaagagagtctcctatctttcagaatgctcttctgggggtcctggaaagctggaggctggagtcagctgctacagcccaaggcagagggccgctgctgggcaaggctgataggacccggaagtagacatgggagaagtcctgcctccctccagccctccagcctcccactagtgtcgccgtcagggagcatcgatttgcagcgtcccagcctcagcatccaaagctgggctggcaggtgcttagcaaccagcgcaaacacttcttctcagtaggtggtcacttgcaccagtataccaacagaaacacagagacagagcagccctcgacatcctggggcaggattttgttattatggtggtcagccacatcctaaatatgctcatattaagttttttagaataactttggaatgaaaatgcaaattttagaattctcctggagaaatcatggactgctgtctaatacattacaaactaggtattcttggttctcagccgagagactgcatcagggcaccagcttggtcctgggaccttcaggacagggatggaggaaatacagaagcagttccatttatgtattaactattgggttttggtggtgtgatgtggtggagatgcatgaagtgtggtagggtgatatatacaaagtgaaatgtgatagcttgaaggatgtagagtacctaacaaactcctcacatttaataaacatgagttttctttccctctgtcatatttctaatacacaaattactttaggttcccaaagatcttcagatatcaccaagggaaatgttaaaccaggccttaatagaatctaattacagttagctaacaggattaaggagtgcagttatgcagattttgagaaattcataagtcaataattattctgttttttctgattaggaaattaagatggaatcatcatagaaaaatggaagataagataagtgtaaacaggcagaaacacatcatctcttcgctctgtaacaatcgctaattgatcccttgggatatttactttgtcatttgcctacaattctatgcatttaataatgctacaacaatactatcatgtattacatacttactgtgccagacattgtgctatgcacttgatcaggattatgtcattgaattctcataatcgcctgtgacttggctcctgttattatccccttttgacagatgacgaaactgagacttagagagtttaagaggcttgctcaagggtaggactcactgaagcttaagagcctgagctctgcatcattgcaccactctgaccctccagctgagacagattatgtgatatataaatttgtgttctaatgttttatgtaattgtatagcatgaacatttcccagtataactgaaactcatgattaataattgttaaagctgcattaatagtttctatatggcttacgcatcatttgcctaagaatcctcaggcctgacattttggtgctttttctgttatgggtaataacttgagctttcagtgaaaaaaggttcatttcgtatgtataccaatgaagtaatacagtgagtatcaatcatgtttgaggtttatatgacaaatttatggttaattttgttttgagcatcttttgaaagaggaatgttattaacaggtacatatataggaatttatagatatgggttatagcatttttttcctcgtccatgttatttcatctgcttttcccagcagttctggaatgcgagtgatcgcctctttgcaggtacaaaaatcacggcacagagtaagcaggtcacaggcttgcccagagtctacggctgcaggtgctcaagctaggcctggaaaccaggacctctggttccctctacaccatgccacgctgtctccttgtctttggtctccaattattgttttcctttgttctgactttatggggagactggcaagagctcttgcaattccctcttgatgttgggagtgttcagattctagccctttccctcttgttctgtttgcctgctcagtagggtcctctcccctatgaatccagcagggtattgacacttccttcatgcttttgcagtggctgatagaattgggtgctacctaacgtgtttttttttttttttttgatcaagaagcaggaaaataaatcagttatctcctattttccttaaaaaacttttaaagccggagaacatttcagtgggagtgagggtcagatttgtgagtaaaaatgtataatagtcttttagaagataagatctgttttgtaaaaaagggaagttccctatggcattgaaaataaagctgccttttggagcagtgctttattttatgtgtaggtttaattaggaagtagcactttgttgtgggaacataatcacagaggagcctttgttttatgcaaacttttagacaagagctgcttgtgtgctgggttttgtaaaacctcattaattcagatgtcagttgttttttcccccaaatttctgaaaaattgaccagtattgagtgaggtttattattatatcattcaaatataaagtatttattaagcacatcgacaaggtcaacaagaaaatagggaaatttcacattcttaagataaaatctttaaagatttttattgcaagaattgcatctaaattggagcgtctcattacaagtgaattttggctgttcctggaaagagattaggcagaaacccttcctagaagcactcagatagaaattacttttactgtatgctttttgtactctaatgattctattccagttttctattacttcatactggcctccaccaatttcaaatattaaggtttcttgaatttgcttggtaaaataaatagattggaagaaatcttaagctcatcattatgatttggaagtaagccaccctaaattcctgtccttcagacatttttatctgtgttgtcatgttctctgtgaagctactagactcagaaataggtctttcttttgttttcacattttcattatctcgttttattttctcatgcatagcttctctgctggttatctattgtgtaagaaatcactgtgaaactttatggcttaaaacagcaacattcattttatacctttcctgatttcagtggggtcaggatttaggaaaggcctgagtgggtatgtctaaggctgcagaccatggggggctagacttggagcagcttaggggagaggttctctggggcagctggaggagggggtttggggcagctggggaagagggtgccagaccagctgggagaaggttcctggggcagctggaggctatgttcatgagagttcagggcgtctccgtgtggtctttccacatgggtgcctgagcttcctcacagcatggcgactttaaggcagcttgcttatagggcagcttggggcaggaggcagaagttgtgtcccctcttagacctggtctccagtcacacagtgccagtttccctgtgctgtatgagccacccagtcactcaggttggcagagattcaacttgggaaagatagaccagcctcacccgtcaaccggaggaggggtgaagaatttgaggcctgttttaaaactgctactgcatcagccttctgaaagggtctttctctaggaggctttaatctttgcagccttgcatatcttatcttgtaggggccgcacccctgtctttaggtgaggtgaagagcttataggaaccaaacaggaatgcacatactgttcttttaacgataagtgagctgaataagtgaaaacaatggaggctaggctttaggaacaagatggagtttttgtttcttgatacgatttatatttaagctttctcgcttacatattatcggtggggattgccaaacagtccaggataaccattttgccatttggcagagctcagttctctttagattttgagctgccaaggtttggctgcactatttcagtgtttctacccagcagggcttcctgcatttggcctgggaggattcagggaaatccgtgaagacagttttgcaggattggatcacaaaatgcttttcatatccccaactgttttggcatcaaagtaaagatttttgtatatttatgggaaaaaagggaagtccgttctgaaattatttcttccattatattgaagctgaaaaaaaggggtaagttttaatttctcaagagatatttctttgaaaaatatagtgcagtttggtatccattctagctttttttttttcttttttatgtattgacttaacttctactcagattgtagtatttccatctttaaaaacaaagctgtaacaacgtttttaaaacatggcttataaaaacctcagctaggtctcagaatatctcttgtgtttttaatgtcttcagtggaccttttctctacacagaacttcctttattttgatgtactagtaacagataatagcagaaagtttttaaactatagaaaaatataagaaaaaagttatttaaaaaatcccctgtgattcttacaatcaggggtgaccttttgctccattgcatcatatctaagaacactgaatatatttaagaaatcagggaatctctgtcttgtgcatactgggatctcaggattcatcgatgaacaagacaacgatcggattcacattaagcccttagtgcaaagaaagtggacaacacatgggcggttccttcagtatgttggttattagcagtgatgagcaggctcgctttcattgcatctttaaaggcaggccccagctctcaaggggcttctggtctggtggggaaaaataggcttctgctgagtggtgtagagtgtgcagggaccgggggtgcacagagaacacttcagaaggaccacttcgtggctcagagaaacaatgcaggccgggcgcggtggctcacgcctgtaatcccagcactttgggaagccgaggcaggtggattacctgaggtcaggagatcaagaccagcctgaccaacatggacaaactctgtctctactaaaaatacaaaattagccaggcatggtggtgcatgcctgtaatgccacctactcaggaggctgagccaggagaatcgcttgaacccagggggcagagtttgcagtgagccaagatcgtgccattgcactccagccggggcaacaagagcaaaacgccgtctcaaaaaaaaaaaaatgcgaaaaggacccaccggaggaagggaggcaggaatacagaaggaagaagcagcagggaagagcagggtgggaaaggcctggaaattagaaagcctggcatgtctgtggagctgacatagtacattcagtcctagaataaacatttcctctcgtttttcttttctatttattgggacataattgacatatagtgaaatgcacaaatctcgagtgtatagttgggtgagttttgataaatacagacacttgtataagccattcccttggtatagaacgtttgcgtcaccccaaaaggctcccccacccccttcccagccaattccccacttgctctcctccctcccagcagccagaggaaccgctgtcctgaattttttttttttttcactttggaagagttttgcctgtgagatgacttcttattaatggaatcacagtgcgtccttttttgtgtctggcttctttctgtgagcatgaggtttgtcagattcacatgccattgcttgtatgagtggcttgttccattcatttctgtgtagtaatttcactttatggatatagcaacatttatttatccactgtcttgctgggtatttccagtttttgtctattgtaaaaatgctgctgaaagcaaagcaatcctgggctcttctcccaggagtcactgtcccgtgctgcctgctgtccaatatttgaaacccattgtttatatcctgtgtccagagttctagctgttcactggaggagagccaggtgctaccaatttcttcttcctagcgaccagcaaaatgcctgtaataatttttaatggaagaatgatattttatcatttggctacacaataattcatttaacctgttcccattgggagacacttaaggtgtttccaatttggggctattctaagttatgctgcaacaaacatttgaatattttatggctgttacggtagtttattttttagtgtcgattccaaaaaattagattatttggttaaatgcttaaattttttaaaatgtgatctttattgccttatttttttcaaaaacattgctcaatttatatgctcagtaacagtgataaagtgtgtttcacaattccttggtagtatagagatcagaattttcttttcttttcttttttgtcctatgctaattgaatagcagagaatttatttgtttataatgagttgtcacattatgtcactgtactggacatatctttgggaggactaagctaaattcagatgcttaaacaatgtttggtctgatttattatcttcacatgtgtaaattttatgattattaatctattgaggcagtcaaattgctataacacggtggtgacatttttagatattgaatatcaatattagaggctggacagacttttcaagtcatattctaaccaaagagaaagaaccgatttgactctaagtctcattattttgagaagttccagttgtcacaagaataactatggaacattggaatattgattaaaaatctgataccttacctctgtattgtgcattttataaagtgctttcctgttcattatttcatcttatgcttacatgaaaaatctgaaaaatgtgtcgatttgtatccacgtcattcacgaatatgcactgggatgtagagaatacatcctctggatttgtcgttttaagcctaaatcatggaaaacattcaatgtagttttaaagttctctaggctataggaaattaaaaatatattactcacctatcactacctttttccaggggaatatgggtgattgtggaattctgactctgaaagcattggttttggtgagatgaccaggctgccaaagtgcactgaaggtagagacttcttagtgactgggacagctgcctgttgatgccgtgcacctcctcagacctgtggtctctttgcaatttgtatgcaggcacttagaaagcactgactcgctctggcctgactgtttcggaaatgaagctaggaaaactgtgaggtcaaatttaaacctgcaaataattagctggatggcatagctgtacaaactgagatagcccgggaaatttggtaaagctttaaaactattatacttattcgcttctgttcagccaactgggctgatttttgagacagagtctcactctgtcacccaagctggagtgcaacggtgcgatctcagctcactgcaatctctgcctcctccgttccagccattcttgtgcttcggcatcccgagtagctgggactacaggtgcgtgccaccacacctggctaatttttgaatttttagtagagatgaggttttgccatgctgcccaggctggtctcgaactcctggcctcaagtgataagtgattcacctaccttggcctcccaaagtgctgggattacaggtgtgagccaccatacctggccaacataagctttcttatcagttgagaattactagaatatgtgtaattgttttcttgttttaaaaaataatagactattttttagagaagttttaggtttacagaaaaattgaatgtaaagtacagagaattcccccacacccctctgtacaatagtttttggatcaaattttggctagtcgttgtttttttttttttttttttttgagatagagtctcactctgtcacccaggctggagtgcagtggcgcaatctcagctcactgcaacctccgcctctcgagttcaagtgattctcctgcctcagcctcctgagtagctgggactacaggcacgtgccactatgcctggctaattttttgtatttttagtagagacgaggattcaccctgttagccaggatggtcttgatctcctgaccttgtgatccacctgcccccctcccaaagtgctgggattacaggcgtgagccactgcgcccggccttggctattcttaatcacccttttaagagcaagtgactgatccagtgcagttcaacagtttctaagaccttttcctccgtagtatttacaagacgatcatgagaattgtcaatcatataatttaagaatttttgcttttcctactatttaatggtatgtaatcagaagatatttatctgtgttcttcatatgaaggaagcacaaaaaaatgtcagttaaataaccacttagtaggtctctagtgggatgaacaatatttagaatcatttacaactttataccagtcttgtatcagtcttatagactgagccaggcaagaaatggggctgcccgaacttgctgttcaggaaatgccaccaaggagaaagcattgtgtgaacaatgggtctttcactgtaaagtcctgagtttggggctctggttttgtattttgtgaagtatcatcatgccttgccagagctcagtaagaatgtgaccgaaatcaggtcatgagaaagataagatttcaaacatcccctcggagctgtttgcttgacctccactgacttaattggtttctatggagttggcccctgcctagaaatactacattcctactcattttcaacttagacagctcagtctttcacaaggttgaatcttcataccattcacttttcatctctttttttttggagggggtgttattataaaatatgcatatcataaaatttaccattgtaacctttttttgtattaaaaatggcatattctctattttgcatactttaatttcagaacaaaataaacaaaaaaaaatccacaatacacaacatccaatcctgctgtcagagtagggagggaatgggggcttgacacccttgtttcctgccttcaatacaaagacaggagagaaaaaaacactagacatcagcagggggagccaggtgggacaggggcacttgaggctgcagtgggagccattttaaccatttttaagtgtacagtacagtggcattaagtatattgtgcaaccgtcaccaccatccatccccagaactttttcatcttcccaaacagaaactctgtaccccttaaacaccaactccacgttcctctcttcccccagccctgggtagcctccattcagcttttgtctatgaatttgattactctgggtaatcaagcttacataagtggaatcatattctatttgtccttttgtctggcttatttcacttagcgtacataatgtcctcaaggcttatctatgttgtagcatgtattacaatttccttccttttaaagactgaataatattccattgtatgcatagaccatattttgtttagccattcatccatcaacgggtacctgggctgtttccaccttttagctattgtgaataatgctgctgtgaacattggtgtacatgtgtattcgagtccctgctttctcttcttctggatatatacctggaagaggaatttctgcatcatgttgtaattctatgtttaattttttgagggaccaccatactgttttccatagtacctgcaccattttacattcccactgcatcttttaaaaaaataaacaaaagccttcctatatattatgtatcctacatatttggatattctcttttaaaaaataagctttaaatattatgatttgtcagttagatactcagtgaagttagatgtgtctaaagaaaaaggagaatcttcaagtagaatatagaccaaggatccatataaaaagtgaaattttacacactcacaagaaacaatactttctcatctctctagtgctaaaactatcaacgattcagctagatttagggcccaaaggaaagaaaacacataattattgtttctgggtgttgtaaatgtataactaataggttaatgtttaatggagttcgttaagtacagatttgcacagcttttctgggcagtatcacctgttggattttagaggcttaatgattaagggccccttttactgtcactgagtgtgatgctcgtgtgttttctcataataaggcatgcgaagaagggatgcaagctgtaagctcttcaccatcgctccatcaactggagcaaaaacaggtcaatgtgaggactaggagaagaggtgaaaagaagttgaatttttagccagatattctctgggactgaggcaagagcggggaagtgtgggctttggggccatgtaggagagaactctgcactcttcctacagtggagagagggatctgatcgagctggaagacactgcttggcctctttgtgttttccttctcactcatgttttggccttttagaaaaccctgtaagacccgttgcttttatctctgctctggtctcttggtgtttacaaagtcagcaccaccatctctcatgatttccaggcaccaacatccaatcctgtgaccttcagctccggtgaccctgtagctccttggtttcagtccctgggatggtctaagcgttttaaccacggtgcacaaacatctgcgtgatggccgacagccctggccaggcgcccgccggctctctcctgccatctctgcactccttcctctgtgctctgccctcagagttcccctcagtgtctttcctcacctttgctccagttacctggacatctctcatctggtttcagagataccttctcttaccttcagggaagacttccctgactatctgccttctccagagttaatgggccttcccccaacacccagacactctcacagcctccacccttctccctggtgacttggtcagcctctggctttcccaccagggcattgggtcacatagaccttccatccactgccatatttgtggcacctggcttagtccctgtgacaaagcagatgctcagttaatgatgactggacgaagcttcagtgaaaaattgttagtgggcgtcccttgtccccagtgtcctgtgtccatgtggagtgttcctttgctcacccctcccccacctgtcctcaagggaggagcagtcattgcctaactcggggacagctgactctctcccccagggcacagtgtgctcttcttttcccgtgcaggctgttctcagacgcacaggtactggcccacaggacagagcttccagggtgggtccacaagcacccactcaggctgtgatgcaggagggagtgtgtcgagcaggcctccaccgcgcccatctacatcatatcctccagttttgcttttttatggaatattgcagactgctttttccaatctccatgacagatttgtgagcctacttccacatcagaagaggaaggaagggatgccattcattgccaccactgtcccaacatgaacaaatggggaactgcattttggagaaagcctagtgtgatttcaaaggcttagatggtcctaggtgaaaacttgatagttaacggccaagggaatcgttaggagttggggaatagaaaaggtgctttttggatttcttaggtctgagaatggcctgtaactgcatttcacaagtgggtttatatcattctaggggcacttggctgtcatgtggatcttacaaggtggggaaaagaaatgaagatcctcacaaagagcatttggtgacatgcctggctgtggttttgaggctgttccagctaattttccacaaatttagcaaaatcaccaagaacacctcgtcaacttgagcaacaggaacaattatagggagaaatacatcgagactaggaagggaagacaaccttttacttgtctgttctgtttcttagataaagcagttcaacactttttgtgggggatgagggacagggtcttgctctgtcatccaggctggagtgcagtggcaccatcacggctcactgcagcctcgacctcccaggctcaagtgatcctcccacttcagcctctccatggctgggaccaaaggcatgcaccaccatgcctgcatgattttttttgtagtttttgcagagatgaggttttgccgtgttgcccaggctggtctcaaatttctgggctcaagcagtctgcccaccttggcctcccaaagtgctgggattacaggcatgagccaccacccccagcctgcacactttttaaaacaacaatactattagtcaccctcaaatggaaatggtgacacctggaccgtgggtcagcttgcggggtgggctccttttgaaatcgcttttctaattgatggaagtcagaactgcttctgacaggtgtttgaagtatttctttcctatcttcagattaccgatcatgggttactatttacgttttaaatgggctcgtatctctgtgccctctatttgtcagcaatcatctctcttactttggcttttcttcaatgtccactttaagtatctcagcatggttctgaagggagcattcctagattgtctgagacatgaattttaagaattttaaggaaagaaatctgcttgatctaaatttatcactattggcagcctgtccctcctcccctaatcaaaacaaaaagcaaaaagaaaaggagcaaaaaagagaaaagttactggacaaggacatattttgttttgttttaattttgggacatgtttattttgcacatctaatggtagcaccaaatttaaagagaaacaaatcacgttttattctgaaatgttcttctcgtttatgaagctgtttctttttgtctgttgagtatgctgctcctaaaatgagataacagttaaaactgccaactgaaatataatataaatgacatttcaagtaattgctctgagaaatgtatttaaaatgtgtattgcagacatccttccttccctctcagctccctagcatctcagtttttgctagtttttgttgccacttcacgtgctgataattgactaagtgctttcgtgattgacacgctataaaactggaagtgagccatatctgcattggtaattagcctcctattaaatcactgcttctttattcatgagtagtaagtgttaattcaaatggtcattttacatttcattctctaataatttcatgagacataaatctcacagagcacaaaatcgccactttcacagggataactcagcaatattatttatcaaatgcacttaactgttcatctaaatctcttttgtctgggaaaagtttatttccttcatgcaagagagaaaacatgccttcattcactgttcagttaccaccgtggaggcaggtaggttcttttatggagaattttcagaccggagtcatgcctggtattgagccccatagatttcctgagagcctgcggagaacagctgcactttctgtggagaggagaggcttcacttctgtctgcacatgggaagttgacctctgatgctggaaaattaggttatctgtattttttagacatctgtgcctgagatggatttaatatatttaagttaagattgaggcccacatgaacattcctgtctggattccttttcagaaagtggcgtttgatgtgtgcctactttatttatgtgacactgtttatgtgcattccagtgatcattaacaaaggctacttggtggaaaatcgtgatgaaagtggatttaaaaatggctgtatcagctgcaggtttagcaagactacattgactctgagtctagtgagaacccctgcatcatcaatttgtgttcagccaaccttaaatccagagaaaaggcagtttagtcaaccatgcaaaaaaagggcaaaagaaatattgtggactttattgggacaagggtttaatattctatatactggccaggcacagtggctcatgcctgtaatcccagcactttgggaggccgaggcaggtggatcacctgaggttaggagttcgagaccatcctggccaatgtggtgaaacctcgtctctactaaaaatacaaaaattagttgggcatggtggcaggtgcctgtaatcccagctacttgggaggctgaggcaggagaatcgcttgaacccaggaggcagaggttgcagtgagtcgagattgtgccattgcactccagcctgggcaacaagagagaaactttgtctcaaaaagaaaaaaaaaatctacatactaacagacagtccttcagtttttctacattacatataagaccaatttgtcaacacatgattggtgaattcggcctgtattaatcaggtgagactgctgtaacaagtagcaccaactggacagcttaagcaagagacattaatgtcctcacagttctggaggctgaagtctaaggtcaaggtgtcagcagagtcggtttcttctggctcatagtggcttcttctccctgagtcctcacatggtcttccctctgtactgtctgtgtcctaatctgcttttcttatgacaccagaaatattcaaatagggcccactacaatgccctcatttaacttaatcacctctttaaagagcctatcgccagatacagccatattctgagctactggaagttagaacttcaatgtatgacttttgcgggaaacagttcagcccataacagggcaaagtgaagacaaattgtatttaggttcttcatagcaccctttgcctgtttatcagacttaccactctcaggacccctagtttgtttcctggtctccagtttggggaccttgaggactattgagagattgtgggaacaatggcccagcatcctaaggaagtctttgatcaagataaaagttaagtaactcctcccttgagagcttgtcctgaagtttttcactacggctgttcttccatttagtatcattttcttatatatgactaagctctcagaataaaagctggcaaaaggttggtaaaatactggaacatggtattgaaataattatgggctgggccaggcgcggaggctcatgcctgtaatcctagcactttgggaggctgagacgggtggatcacaaggtcaggagttcaagaccagcctagccaagttggtgaaaccctgtctctactaaaaaaaaaaaattaaaaaaaattggccggacgtggtggcaagtgcctataatcccagctactcgggaggctgaggcaggagaaccgcttgagcccaggaggtggaggttgcagtgagcggagatcgcaccactgcactccaacctgggcaacagagtgagactctatctcaaaaaaaaaaaaaagaaagaaagaaagaattttgggctggatgcggtggttcacatctgtaatcacggcagtttgggaggccaaggcgggtggatcacttgagcccaagagttcaagaccagcctgggcaatatagtgagaccccgtgactatgaagaaaattgaaaaaaatcagccaggcatggtgtggcttgtctgtggttccagagatttgggaggctgaggtaggagaatctcttgagcccaggaggtcaaggctgtagtgagctgtgaccacgccattgcactccagcctgggtgatagagtgagatcctatctcaaaaaaaaaaaaaaaaaaaaagaaaagaaaagaaaagaaagaaagaaatgacactggttaaagtgaaagggtggaaaaactggattagggcttatccgttgtctcagcctgggatttctttccttttctttgcaatatatagaagtagtgcagcatagtgcttaagagtacaaactgcctgggttcaatccctgctgtatacagtttagcacctgtgagatcctgggaagattacctaacctttctgtgccccaatttcctcatctgtaatggggggaaatgacagtacttactttgtaagaagaatgttgttgtaagaattcagagttgttggggcatggtgcctcatgtctttaatcccagcagtttgagaggcatggatcatttgaggtcaggagtttcagaccagcctggccaatatggtaaaacctcatctctactaaaaatacaaaaattagctggacatggtggcgtgcaccagtaatcccagctactccggaggctgaggcaggagaatcacttgaacccaagaggcggaggttgcagtgagccaagatcatgccactgcactccagtctgggagacagagcgagacactgtctcaaaaaaaaaaaaaaattcaaagcgttaacaatcctaatgaagcacgtggtattggtactggccacagtaagtgcttcgtggcattagcattcattaatctttgtttcttgcacactctccatcgtgttcccccacctaacagaataactggaagagctgccactatgcttaacatatgaacccggtctccaggtgaatgtaggaatctttttgtttgtttgtttcttggcattacaaaaatgaaagttcagtgaccctaggtgtgtgtggacatttgggggcaggcagcacgcagggtggctgaagggctctggagttgacaccacctggtttcttttgggacctgcaactcagtagtttgtttcttgacctctctcttcatcagtttccaaatgtgtaaaatgggcacaaaaacaataatggggttgtttgggattaaatgtgatgatatatgtataaagctcttaacacgcacgtggtaaacttgttagttctttccatattcaagtgtgaaactggaagacaaagtaattacattctgtttcagatgtctttgtaaatgaccttgccttctctccctccccaatgggctgcctgatcaccctggctcatgtggcgcctctgctttgtgaagtcaagtttcacaggtgcagcagtaatggatggtcacaacccacatattgagttcaacttttatgatgcaaacatttacaaaacagttggacagtgatgagtagctatgaggatgttctccgttgtcctccttgtcaaagccccgaacacattatttcacttctgtttttttttttttggagacagtctcacactgtcgcccaggctgaagtgcagtggtgcaagctccactcactgcaagctctgcctcccgggttcacgccattctcctgcctcagcttctcgagtagctgggactacaggcgtccgccaccacgcccagctaattttttgtattttagtggagacggggtttcactgtgttagccaggatggtctcgatctcctgacctcgtgatccgcccgcctcggcctcccaaaatgctgggattacaggtgcgagccaccacgcccaggccttatttcgcttctaatgtgctttagaaacagccattgtcttcgaaaggaaagtagctcatgctcagagatagccaaaacatctgacacactgaaatcactcgcagactgaagtcgattggagaatgtttctggcaggtggaaagagtgactataatgagatagaattgttagtccttattgattctgtggaattccagaatcagggaaaagaaaaacaaagaaataaaacccaagaaaatccaggcaataagactcagtaaattaacaacttccttcccaagacatacacatatatgtgtatgtgtgtgtacgtgggtaaattttttttttttttttttttttttgagacggagtttcactctgtcacccaggctgggagtgcagtggtgcgatcttggctcactgcaacctctgcctcccgggttcaagcaattttctggcctcagcctcccaattagctgggattacaggcatgtgccactacacccagctaatttttgtatttttttagtagagatggggtttcaccatgttggccaggctggtctcgaactcctgacctcgagtgatctgcccgcctcggcctcctaaagtgctgggattccaggcatgagccaccgctcctggcctaaatttttatatatacatatatatatttacacacacacacacacacacacacacagctgacccttgaataacttgagggttgggagtgccaactcccaaggcagtcaaaaaatccatgaataacatttgacttccgtaaaagacttaactactaatagcctattattgacttgaagccttgctgataacataaacagttaccacatattttatgtgttgtatgtattgtattatgtattatatatgtatttatgtgttgtatgtttatggtatattcttaaagtaagctagagaaaagaaattgttattaaaattgtaaggaagagacaatactatatttactattcattaagtggacgtggatccatcaaggtcctcatccttgtcatcttcacattgagtaggctgaggaggaggaggaagaggggttggttttgctgtctcaggggtggcagaagcacacaaaaaaattagtttataagtggacctatgtagtttaaacccgtgttgttcaagggtcaactgtacacacacacacgtttagaggtccatttacacacatgtattgcatggctattttacaaattaaaagtactggactttggtttttaaacaaatcacccatatccatccaggttagaggaagtctgcagtcagtagcagttcacctggagaaaggcatttttgttttttgttgcttgctaccccaacctgagttagtaatctaagtttactgtcagaaaagtgaatgcttgctaaggctgaataactaaaacaggggtgtgatattttcactacgttcttgacaattcagaaaacatttagagttctctattcaattcctgggagctgcattttaaaataaagttgtgtccagagccttatgacaaggcaaggatgtcttgttaaatgatgaatgttttcaggaaaccagaatactgaggataaaaacgagagattctggaggtgatatatgatagttatgttcagatacttgaaggacagttacatgaaagtggaatccaagatcttttctgcagctccagcatgtcgaatattatgggggagcttgaatcaatgtaaaaaaaagattatctggccaggcatggtggctcaaggctgtaatccaagcactttgggaggtcaaggtgggcagaccacttgagcccaggagtttgagaccagcctaggcaacatagtgagaccctgtcacacaaaaaaatacaaagattagccaggtgtggtgctgcatgccactctggaggccgaggtgggaggatcacttgagcccaggaggttgggactgccgtgagctgatatcgtgccattgcactccagcagcctgggcaacagagtgagaccttgtctcaaaaaaaaaaaaaaaaaatcctctaatgagggagttgtcataaaacaaaaggactgtcttaggagctaatgaatttcctgtcactggaagtacttgcagaaggcctggggtttttggagaggtaattccttctcagttttagattttgggctagatatctaccagggtcccttccaaatccaggatttgtctggctagtttcctcccgctgctaatagtcatctacattcatttttttttccccccagtttgtttcctcattactctggcttttaatttttttcaattaatagacatttttggaacagttttcagtttgtagaaaaatgagcagaaagtacgaagttccatactcctcactctctcccttccctccagttgctcccactattaccatgttgcattagaatggtacatttgttatcattgatgagacaatattgatgcattattattgttgagtccatagtttacctgagggttccctcttggtgttgtacattctgtgtgtttagacaaatgtgtaatgacaagttcccaccattagagtatcatacagggtggtttcaccgccctaaaaatctcctgtgccccacctattcatccctccttccctcaccctgagacgctggcagccactgatctttttgctgtcttcatagttttgcctttgacacagtgtcatacagttggaatcatatagtatgtagccttttcagattggcttctttcacttagtaatatgcatttgtttgtttatttatttatttattatttttgagacagagtcttgctctgttgcccaggctggagtgcagtggcacgatctcggctcactacaacctccgcctcctgggttcaagcgattctcctgcctcagcctcccgagtagtcggactacaggcatgcaccaccatacctggataatttttttgtagttttagtagagatggggtttcactgtattagccaggatggtctcgatctcctgacctcatgattcactctcagtctcccaaagtgctgggattacaggcgtgagccaccatgcccagtctatctatttattttttgagacagtttctctcttgttgcccaggctggagtgcaatggttcagtctcagctcactgcaacctctgactcccaggttcaagtgattctcctgcctcagcctcaaaagtagctgggattacatgcatgcgcctccacggccggctaatttttttgtatttagtagaggtgtggtttcaccgtgttggtcaggctggtctcgaactcctgacctcagctgatctgcctgcctcggcctcccaaagtgctgggattacaggtgtgagccatggtgcccagccatttttttttttttgatacagagtctcactctgtagcccaagctggagtgcagtggtgcaatctcagctccctgtaacctctgcttctggggctcaagtgattctcgtgactcagcctcctgagtagtggggactacaggcgcctgccaccacacgcagctaatttttttgtattttagtagagatgggattttaccatgttgcccctgggtgttctcaaactcctgggctcaggcgatccaccagctttggcctcccaaagtgctgggattacagacatgaaccactgaacccggccagtaatatgcattcgaggtttcttcgtgtctttttgtggcttgagaattcatttctttttatcataatattccatggtctgcatgcaccatagcgtgtgtttctatttacctattaaaggacatcttggttgcttccaagttttggcaatggtggtgcaagttttcctgtggacctaagttttcagttcatttggttgaattcccaggagcatgattgctgagtatggtgagcatttttattactgagaatggtgagcatgtttagttttgtaagaaactgccaaactattttccaaagaggctgtacctttttacattcacaccagaaatgaatgagagttcctgttgctccacatcctccccagcatttggtgttgtcagtgttttggattttagccattctgtagatgtgtagtgggctgacttttttctcaattttagatgtgttatctccaaatcactatgaaaaatacttttaacactactattaatgtaacataacactagtatctttcaagatccaaataaagacattggaaacaagaacaagctcttatgttcatatcaatattgttaataataataatactacatatttatttgtgagtactttttgagttcattctgaaaacaaatgctactaggagattattcacaagacacatttctgattaacatgtatgagcagttatactccaaagcttcgattttggcaaccaatgtataccagttctctcaaggtgcacttttgtttttgaacagttgctactgattctattttttaaaaaaattattgtgtatatttaaggtgtacaacttgatttgatatacatatgcaatgtgaaagaatcatcacaatccagataattaatatatttatcacttcacatagttacccttttgtgtatatgatgagcatacttaagatctacccttttaataaataaatttctagtatacagtacactattgttaccatccattatatctccagaacttattcatcttgcataactgaaacttggtatgcattaaccaccatctccctattcccctctcctcgcacctcatggcagccaccattctactgtctgattctaagttcaactatcttagattctacctttaagttagatcatgcagtagctctcattctgtgcctggcttgtattgattctggattgagacttttcagtgtctttgtttcaggtctttcaagttgcatatgtcatcattaaagctgccaatgcccctcgacctggaaactggattttggagcgttctctggatggcaccacgttcagcccctggcagtattatgcagtcagcgactcagagtgtttgtctcgttacaatataactccaagacgagggccacccacctacagggctgatgatgaagtgatctgcacctcctattattccagattggtgccacttgagcatggagaggtaggtatggtgcccgctgcagcaagatctgtttcctcatcagagtctccctgtctcagactcaaaattgatctctctcaatacaaagatctttaatataactatctagctctatttaaagtggccttgagtcatgtctattataagtaatttcacaaacaatatggtttaccttgttgacttcctctcttcaaggaggctctcagtcttcactctgctgtgatttaataacgcccttggatcctccttcagagcatcttccccacagcaccagggcaagaatgtttgttgaaatattagagagctaaaatgtcccccaaagttgtagttcccttttctcagtgttctcctcggtaggtggtgagcactggagactcttgaagtcttgcagcttagtgcccaacatgcccagattgtatacacttccttgaagtcagagtataatgagaaacagcccattctttagtagcacctggcttgatgagatgaaactacaaaaattctccagtgctcttcacagcgggaactctgcagcgagctgtgagttgtttcaagggcagagattaattaagacagcctgtatcattcaggctttgtggactttttctttgttcttctcgaagcctattcataacattttaaatttgcttcagagaagttgtagcccagggacagatgctgaaatattctaaccacttggagagaaacggtcttcttaaaagattttcagcaataatgccataatgtgatgaatgccgtagtctttgttcttcacattgtagtctggttccacatctgatctttggcaagtgagggttttcttttatatcaaattttaaagtttgagacataatttacattcaggaaaacatacagattttaagtatatagtatatctgagacagtgaaatagataccttcaataaactgaagacattgagatcatggtaattcacaagtaattaacaaatgttagacatatttttacaagaagctagttgttttgttttgattttagatggtatctctaaaagattctgtcctgacattagacaatcagggctatatttttgcatgcttaaaattgacatttgtggtcaggtatggtggctcatgcctataatcccagcattttgggaggcaaggcaggcggatcacctgagttcaggagttcaagaccaacctggtgaatatagtgaaaccctgtctctactaaaaatacaaaaattagctgggcgtggtggtgcacacctatagtcccagctactcgggaggctgaggcaggagaattgcttgaacctgggaggtggaggttacagtgagccaagattgtgccactgcactccagcctggaccaaagagcgagacgccatctcaaaaaataaataaataaataaacaattgacattcatctattttgatgccttcatcttcagattcatacatcactcatcaatggcagaccaagcgctgacgatctttcacccaagttgttggaattcacttctgcacgatatattcgccttcgcttgcaacgcattagaacgctcaatgcagatctcatgacccttagccaccgggaacctaaagaactggatcctattgttaccagacgcgtgagtatgggacggcagtcctgccaaataaaataaaaagattcattttatttaaaggaactattatttttcttctttcctttttggttgttctttccccgacatgttggccttttttcttgccagcagctgtatccttatttcatgtaagattgctatgttgttacagatgctgcctttaggtgatgggccaaaatcatatccttaggtccctcacccaccccgtccccatagtgccataatgtggtgaatgccatggtctttgttcttcacatcgtagtctggttccacatctgatcttcagcaactgagaattttctttcatatcaaattttaaagtttgagacataatttacattcaggaaagcatacagattttaagtatgtagttaagtgtgtaagactggtgtcgcaaaaattttcatatcccttcaataacccaggagtgggattactaagttatagggtagctggatgtttacctttttaagaaaatgctaaacttatataaaaagtagttgtattcagctgggtgttgtggctcacgtgtgtaatcccaacactttgggaggctgaaatgggagggtcactgaagcctgggagtttgggaccagcctgggcaatagagtgagacctcaactctatttaaaaaataaaaataaaagtagttgtgtccgtttttgtagtctgaccagcaatgtgtgagagttctggctgcactacacactgttagatatttagtgctatcagtcatttttatgcccgctgttcctgtgtgcgtgtattggcattttgtgacgttaatttgtgtttctctgctgactaatgttgacaatgtgcttactagtatacgatcagattttttttgtccatttttaaattggacaaaaaataagcctccttgttactgacttataaaagaattttatatattttgtatacgaatccttcatcagatatgtatatattgcaaacatatccgttctacttggtgtttgcttattcaccttcctgtgactttggatgagcagaggttttgtgacgaatcccaatttaccattttttcttttatgattaatgctttctatgacctcaaaaaatattagcttatcccaaatttaccaagatatcatggtaggctttcttttagtagctgtatagttttagcttttacatctataattcattttgtattaatttttgtgattggtgtgagggaggagtcagagttttttttgcttttgttttttttcctatatgtatatgcaattgttctagcaccatttgttgagaatgctttacttgttttggggccgttgttgaaaactattcaaccttattattgtgggtttatttctggactctctactgttctatagatctgtttgtctattcttgtgccaataacaagctttcttggttactgtagctttacagtaggtcttgagaggtcaggtttcttgtatttccttatgaattttagaatcagtttgttaatttctgcaaaaaaaataaagcctgctaagattttcattgggattccattgattctttacaccaatttgtgaagaattttataagacattttaacaatgttgagtcatccaatctgtgcacctgatatataacttttcacttatctaaatcttctttaattctctttggcagagttttattgtttatttgaaaaggtcttgttcaataatgctcaacaatgttcaataatgaaaaaagaaggccgggcacagtggctcatgctgtaatcccagcactttgggaggctgaggcgggtggatcacgaggtcaggagatcaagaccatcctggctaacacggtgaaaccccgtctctactaaaaatacaaaaattagctgggcgtggtggcgcatgcctgtaatcccagctactcaggaggctgaggcaggagaatagcttgaacccaggaggtagaggttgcagagagctgagatcgcgccactgcactccagcctgggtgatagaccgagactctgtctcaaaaaaaaaaaaaaaaagaaatcaaggcacacatagtaagactaaactgttattatttgtagatgacatgattatgtatgtagaaaagctacaaagcaactaccagaaataacaagtgaatttagcagtgttgcagtatacaaaatcaatgaacaaaaatgaatcacatttttagtcactagcaatgaacaatggaaaatgaaatctaaaaagaagtctattaacactaacatgtaaaaacatagagaactggtgagtgcatttcttcagaggaaagcactttgttctgttaatgtgatttacatttcttgatttttgtgtggtagattaactttgcattctagggtaactcttacttgttcatgatcttttctatagagtgctgtattcaatttgccaattattttacggttttcaataatgagttttgaaacattactgacttggtttaagatgcagttggggaattcttttagacttctttgggttctgatgagctaatttgagcctaatttattttaattgagcacaggattctttgtgcatgaaatataatttttaaatgtacatgtaattatattttagattaccaataaaaactcttaaactacatgagatatttgttggtgtgccaacattttcatttcactgaaatctaggttttaatttttgttcataactttctttttccttagtattattattcaataaaggacatttctgttggaggcatgtgtatctgctatggccatgctagtagctgcccatgggatgaaactacaaaggtgagttctagtatttcacattttactaaaacttcaaaacagaaattgtagctataatatttgcattactcttttttattccaaacaaacatgaaaggtataaaattatgctccaaaaaaacagattttcagaaatttaacttgtgtcatttttaaacaatttcattttgctttggaggatatgtttctaattaagttcttacaatgatttttttatgtgataaaatatccctaacataaagtttaccatttgaaagtgtacagttcagtggccttattaattttgaagcccttctgtctgtaagaaagtaaaaaaaaaaaaaagtgcaattataaattatgtttatattttttagaagaaaggttttctcttcctattttctccccttccgttttttttggtgctaaatcaagatttaaaaggggcatggtggcttacacctgtaatcccagcactttgggaggcagaggcgggtggatcacttgaggctaggaatttgagaccagtctggccaacatggcaaaaccccatctttgctgaaaatacaaaaattagtggggcgtggtggtatgcacctatagtcccagctactcgagaggttgaggcaggagaatggcttgaactcgggaggtggaggttgcagtgagctgagatcatgctgctgcactccagcctgggtgacagagcgagactctgtctcaataaaaaaatttaaaaaaaagatttaacagtttatctcttttagcattacattaaatgaataatatgacatcttctccttttattttttaaaatttttatttatttagagacagttttgctcttgttgtccatgctggagtgcagtggtgcaatctcggctcactgcaacctccgcatcctgggttcaagggattatcttgcttcagcctcctgagtagctgggattacaggcacgtgccaccatgcccagctaattttttgtatttttagtagagatggggtttcaccatgttggccaggctggtcctggcatcttcccttttaaaacacttgcatgaagttacttcttattttcttctaatctttgtaattctttacctcttgaataggactattctgttatcgatgctgaaaaatctgtagatgaacactaagaaaattattaataggagtttctaaacccttaataagttccatgtatatttttaaaaaaagtttttattagctaagtcgtattctggttttgctttattcctcttcatttctgtttgtaaccaggttatttgtatatattggcatctaaaaattaaatgccagtttgctttgatgataatcatatatcctctgttgtgaggttcttgccacatatttgacagataggttctttttaccatgaaattaagaaacataagcagatacattttctaattcagttttggcttccttattgtgtagaaactgcagtgtcaatgtgagcataatacttgcggggagagctgtaacaggtgctgtcctgggtaccatcagcagccctggaggccgggaaccgtgtcctccggcaatacatgtgaaggtcagtatacttagaatctgaaggtcagtacagttttcctcttaatacgtcccaagtttatggtgtcttaacaacttttatagttagcaggtaacttgttttcttagaaatttaagtagtttccaaagctgcagatgaccttaaaattttaactattgtggcctaaatgtatctttatgggtttgctgttttatctatgagtcccccttcccgtatagtctattattctgtattaattttacttttgtttttgtttttttaccatgggatatgccaggttgtatattctgtattgatttggatttaagttttaaataagcaatatattcacaagattcctagatctaacaatatgtaaaagtatgtagttaaaagcatgacttccacttcatctccctccttcgcactttttattgttttctagtatgtccttcctaaaattgttatgcatataacgcatatgttaacatatccctccagccaacacagttcttacgcagaagacaatgtactatgcatgccattgtacatatcgctttttttttttttttttttttttgagatggagtctcactctgtcacctacgctggagtgcagtggcgcgatctcggctcactgcaacctctgcctcccaggttcatgcttcatgccattctcctgcctcagcctcctgagtagctgggactacaggtgcccaccaccacacccggctaatttttttgtatttttagtagagacggggtttcactgtgttagccaggatggtctccatctcttgacctcgtgatccgcccgcctcggcctcccaaagtgctgggattacaggcgtgtgccatggcgcccagcccacatcgctttttatatttaacaatgtattgtgaaattctttccatattagcaattagaaatgctgtttttaaaaacagttgcacagaattccattatacaaatgtagtataatttattaaacaaccacctatcggcggttattttgatggttattagtctgttgtccacacaaacaatggtgcagtgattaaccctgtatgtgtccttctcaagtgggcaagtacttctgcgaaatataatcccaggagatggtttgctgggtcaaatgggtatgtgcatttattattttgatattaatagctcttcccaattgtcctccataatactgcccatatcttattaaaattacttattctaggattttaatttaatctaaaatcatagaacttacttagggaggttaagagttttctttgtataaggcatgctatgtaaattaattgagatgttaaaaatattctcctagcatgtaattgtcacaataaagccaaagactgttactatgatgaaagtgttgcaaagcagaagaaaagtttgaatactgctggacagttcagaggaggaggggtttgcataaattgcttgcagaacaccatgggaatcaactgtgaaacctgtattgatggatattatagaccacacaaagtaagagtatttctttgccattgctgatcttcatcatcttccccaggtggaaaagagactttgtcaagtcttaacctctgtattggagacttttgtaatatttcatttatatccttgttatgccagtagtgtttttatatatatatttcctactctatcctgcttttcttgctcaaaataagatgtcagtcattgttatttatcttgaattcaggggtccattagctatgtaatcctgggtcataatactaactacagatgtgaaaattcagctataactaaagcagctgtctcttgcctgtaggagatgttcagccaatcttttttttttaatttttattttttgagacggagtctcgctctgtcgccaggctggagtgcagtggtgcgatctcggctcactgcaacctccacctcccgggttcaagcgattctcctgcctcagcctcccgagtagctgggattacaggcatgttccaccacacccagctaatttttgtatttttagtagagacagggtttcaccatgtcggccaggatggtctcaatcccttgaccttgtggtccgcctgccttggcctcccagagtgctgggattacagatgtgagccaccacgcctggccgtgttcagccaatctttaattgacttgatatgtagttcttacatgagtccttgtggtgtcctggttataacgtggctctgagagacagcagcgcgaggggggctggagagcagggataatagaaaaagatgacactttgctaagggtactaactactgccaccatcaaaaagatgtttgggcttcctggcttgggatcatcttatcttcctcaaacctaacccccacccccatgcacaaaatcatcgtaatagtcccatcttgagtaaaaagccaataccttcttatttatactattgccaacattgctgttatttctagtaagagaatccagggcaacctctgcctttcaggtgtctccttatgaggatgagccttgccgcccctgtaattgtgaccctgtggggtccctcagttctgtctgtattaaggatgacctccattctgacttacacaatggtaagtacttgattcacttttgtgcttgtaattgattttgtgtgtgtgtggaagatttgcacatactggaactaatggtaatagccagttggtaacatgattattgattcttttgttcaccaagtacgtatcaagcacctactatgtgtcaggcagtttttgaggacctgggaatgtgtacttaacaaggtagtcaaagtccttgctcacaaaaacactaaacaaacaggtacatgggtaatataatgccaggtcgagaggtagtgtcatggacataaagcaaaattaggactcatgaatggagggagatggggtaatgaggtgacaatgttggggtgatgaaatgacatttgagcagataattgagcatttggtgaaggaagaaataaggcccagtttaaagccatgcgtggaacacagtaaatagcaattgctctccttagcttttagaagacatttggagggcttttgcataaatcatctcacagatcaagcaagtcctcccattaacttggtaaatgtcagagttctctttccgtttcaaaaactggcaaattgacttgcaaataccagagtctcctgaataggttgcgtctgttcaaagactcttgtgaccccatcaagttctcagccactggcagttaaaatggatatcgaccagtagggatgggtgggccccccagcgatggggagggtaaattacccaactgaattgattcttacgtgcacctggtgaggggatgatgacgatgataataatgaagatgatgatggtgatagtggtggtgacatttaccctcaattgagttcatttaaaaaaatatatcatttaaactttgcaaccatagcagatagaaattacttaacccactttgctgtagctcagagcagtcaagaaggttaactgcctgaaggtttcaaaactgacattaaaagcaaagatagtgcttgctgctctctgccacttgcctctgtgcttttttttttttacaaaacagttttataatttacaacgatacagttctcccatttgaagtctacaattcattgttttggtgtattggtgcaaccatcaccacaatctaagagtcgaacattttcatcatcccataaagaagccccttacaaactagctgtcacttcttactttcctccagccccttctcccggcccctggcaatcgttaattacctttttctttgcagatttacctattctgaacttagaaatggaaccatatatgttggtttttggtgactggcttctttcatttagtataatgttttcaaggtcatccgtgttgtaccatgtatcagtatttcaaccctttttattaccaaataatatttcatagtatggacataccatgtttcatatatccattcatcagttgatgaacatttgaattgtttctactttggggccattatgaacaatgctactagggacttttgtgggtgtatgttttcattattttattgggtgtttacttaggagtgcagttgctggatcttatggcaactctataacttaacattttgaagaagtgtcaaaaggttttccaaagtcactctaccattttatattcccagctccctccacgggtttcatctctgttttctttctttaaacaaggaattggcaaactatggcccatgggccaaatccagcacactgtctgttcttatgaataaagttttattggaatggagatatagccatttgcctgtgtattctctatggctgtgttcgaacaataatggctgagctgagcagctgcaaatgagactctgaggccaaaaagcctaaaatagataccctctgaccctttacagaaaacatttgccaacccctgctttaaacctcttttgccttcatgttgggtcattgccattgttgtctttctagggaagcagccaggtcagtgcccatgtaaggaaggttatacaggagaaaaatgtgatcgctgccaacttggctataaggattacccgacctgtgtctcctgtgggtgcaacccagtgggcagtgccagtgatgagccctgcacagggccctgtgtttgtaaggtaagtggggaggtcagagacacccctgagcttcctttgagcttctctggaaaaggagtgttttccattggctccaatgatcagttcttgagcaaagtggtaaggtttaagcagaactccccttgccccttctctccaagccacaccgagttggctgtattatatatgcttggactcacatgggcatctggcttctttttttgtacctctggtaatggtgatatattccagaggcatttctgtgacttcttagaggacaccaaacactgcatacctttatattcccacctcctctgtgggcctcatctctgttttctttctttaaaccaggacttggtaaactatggctcgtgggccaaatctgacacactgcctgttttgtgaataaagttttattggaacagagctgtatccatttgcttatgtattttctatgactatgttcaaccaataaaggctgagttgagtagttgcaaaagagatgctgttgacccctagcttaattctatggtattcttttccagctttgtattcggaagagaaccagattaacattaaatttctgagaacaccaattaaacgcagatatgctattttgagtgtctgttaaaaaggagttgaatagtcataagaaatgcattaatatggtgccagtgaggggttttatttggccttacaatattaataacaatttcttcataattcataggacattccattgtacctatgtgcttattcccacctgtgcagtcttaggcacatgttatatactactggaaataatcttgagcatttatgaataagagaaaattctatagctctcttcagattttgaaatgctggaaagatcagtaaaaaaatgaaaaatttaaaacaaaacaaaacaatttaaatggaatgaccgagttctaagatctccagccttgttcttgagtacaaaatcaaattatatataattcaaaatctctattctggaaatattgactttatgaggcctcacctttactttggacgtttattcacctgtctctgtggatcaccgaacacctatcttgttaatgtcattttattctctctggacagacacattggtttcaaaagctaatcttttaccctaacttacaggaaaacgttgaggggaaggcctgtgatcgctgcaagccaggattctataacttgaaggaaaaaaacccccggggctgctccgagtgcttctgctttggcgtttctgatgtctgcagcagcctctcttggcctgttggtcaggtgggaggcgccatctgcgcggcgggatttaatgagcaggtcgtattgcacaagcttggcacgagctgtgtgaggaggaaatgaggatgacttcccgtgacaccactctcatcgctatgcaatgatactgacgtgggtcaaaggcagccgtctgcctctcaagattctttataggtcatgtgcttactcccacacacatttctctatggaaaaaacaggatgatgtggcactagagaacacgtcttgtttcaatttcttctgtggggaaatggattgggtggggaggtcggctctccctccgcccgcccctgctgctctcaggcctgggagcccagagggccgtggggccatggggattttccagctcaaagacgctaaggagtaggaggccctccagtggcgagggtgggaacagcggcacgtggtgcagggtttaggaatgcaggccaagttgtttccggaacagggagttctggggtgatgggttcaacaggggtgtccagtggtggctaggagaggtggagatggtgtgatggctgcaggcaagggaggagctgctcggtagggacttacccagcagtgactgctgtggacaccacgctggggggagtaccatcacctctatgtcggtgacgcattgggagtataagatctagaggttatctttgtacatttttcaacatttgggtaaaaagcagggggcaacgaagaagagggagtcagacttagcaagagacattttgctgaatgcatttatgatgttctttgttgttttaaatctaaaatctatacccatggcctttatggttttgctcatttatttgcttatactggatctggatttggagtagtgagacttgttctcaggtcctcctggtcctttacaagtggaagggtcaagggtcatgaggttcagcagccacaggtgttatgttaatgccatccctagagaagctttctggcccatttcttcattgtgaaaatattactgctgcactgggtgaaatctaaggtaagttctatttcatacttcaaaattcttgaatttgtttttaaggtaaacagtatgtccgggtggctggtcaccgacttgatcagtcccaggaagatcccgtctcagcaagatgcactaggcgggcgccatcaggtcagcatcaacaacaccgcggtcatgcagagactggctcccaagtactactgggcagcccccgaggcctaccttggaaataaggtgcgtgtgaccctgcaggtagcgatgtctcagatgaagatctcagggaacactgagaaagaacttgcgctgcctgcattttaggtagtctcatagggcacctgagtgttggacagcatttcatagcctgtacttgcatctgatgatacaaagaaggttttctagccttgttagactttatgttgtattattcaaataagaacttctgctcttctggtctggttcctgagcagtgtgtttggtgaagtctcatccccgtctctgagataaactttctgggtccctggatcacttgtttatgaagtgttcctcacattcccgctttgtttagtttgccataggctcagcttagagcctccatggcttagtggagggcctggcatacaagaaacaacccagggaaggttccagcaatgggactgctgtgctgctccctcactttgagtaccgtggcaggctgtgctcatctgaagctcacatttaggaacagatggaatactttctgcttttgttatatttcaagaaaatgcaaactggtgattctgcaatgtggaggttggtttgtaggcttgggccttccttgcaatgatgtgttcccattcccccctccccacttatgccgcatctctccagattctgattgatacgaaaatttattcccgagaatgcatctcaattattatagctccctgcttaccttcccgggtttttggttttgttttgttttaaagtaatggcatacaggcatgctagtgtagtcttgtagcttggtacgcttctatttaatttgatgatattttcattttaaaacttgttttgtatatttttaaggagtatttatttttgaaaattatttttttctcaaattataatcctagaacatgtgctctattgatatgattttatcaacagagttcaatgatttttttttctcttgatatcacttctccaattttatggtgcaaagttgggttctgaacaatatattgctgtcatatacccatcagaaagaaaatcttaattttatattgaaggacatctaatcagaagaaacacctttagtcctttctctaactagcaaatcagacatattctttgttgtcctatgaggaggatgctgaaatgaaaatgtggagattgtagacatgggtcaaactcctcatcccctaaattacttaaccgaagtaaatatctattgtgtgattaacaaaagtttatagtaatttgccttgtggtctctaacaaagagtacatttttcttctgtgctttcaaacagtgtcctgcatgttggtaatattgattaaccaaaatgtttatgaatatactcccctttcactgcctttaatgtgaatttccttgtctgtcatggtcaaggggatagttgtagcctagttgtttgcagatggatcccagtgaccacttcctcttacttgattgttgctgtgattgtcttcccctttcgtgttcattctcgcttaaacatttcagctgactgcgtttggcggattcctgaaatacacggtgtcctacgatattccggtagagacggtagacagtaacctcatgtcgcatgctgacgtcatcattaaggtgattgtttttgctttgattctgctatagagcttagggcttagtgggctgatagtttatgactgaaagttactaggtgaggacatcccagcaaggagctggtggccaggtggccattcagtagaccctggacttgcgtggggactactgagatggtgagtgtgagaatctgtctttgagcccatttctggagttgcctcaggacagcacccgccactcttctcttcatctccagggtgtacccatcttttcacatttaaaaagaaagggagctgggcttggtggctcatgcttataatgtaagtgctttgggaggctgagacaggaggattgtttgaagccaggagtttgagaccagtctgggcaacatagtgagacccccgtctctcaaaaaatattagccaggcaccgtggcacgtgcctgtaatcccaggtactcgggagggtgaggcaggaggatggcttgagcccaggagttcaaggttatagtgagctgtgattgcaccactgcactccaacctgggtgacagagagagagcctatctcaaaaaaaaaaaaattttaagtaaaaaggagacaaatttttgctctgaccttgaatcttctttttgaagtctcttcttccctgtgccactttgcctctcagatgaatggattaggcagtacttggcggtctgaggacagtagacgtgttgccatacttgtcctcagcctctgtccctatccccacatcctcagtctccataaaaagatccagctcagtcaggaggactccccaagtggtaatgtcccagggtctggggcatgtctgggcagaaaccactccaggttcttgtctctcatgtcctttcacctggagctatcttcacctccatctccagcctgaccaattgcagaccgcacacggtaaatcacttttgtgaacagcaacttgatgaaaagctggagctatgtttacatactttttctacttctgtactttagttaaagattagaggtgtcagatgggttgctttgataaaagctgtgggcaactgcacgactttctttcttttccaagatcccagcgaagtacacaggctttcagtttattaccagaacccctctaaaaataatacaatgaaacaccttttctctgataattctgggccaagagctgtacacaccattacacgtttgccacaagaagctaggcacgaatgaaaaaccacgttgctgaatacaaaatttgattttatttttattttatcattaaattgaatgacaaatatattttctcttgtttttaaatgttagggaaacggactcactttaagcacacaggctgagggtctgtcattgcagccttatgaagagtacctaaacgtggttagacttgtgcctgaaaacttccaagattttcacagcaaaaggcagattgatcgtgaccagctgatgactgtccttgccaatgtgacacatcttttgatcagagccaactacaattctgcaaaaatggctctttacaggtatgtattgaaaatggaggaaaaacttacggtgaaggtacttccattttatgtttgtttattcatatatatttaaagctcaacgtattttacattcattatattaaggacacagctacaggatctggctgtcttaagaattattaagtttataaatgtaattttattgaaaacgtaagaacagttatccacatcaagtgtatccagtagaagacagacttgacattaggatgagaaactttcaaagggggtttctgggaaatgcacgatgagttagcgattgtctggaccatgttgcacctggttctcaccatcctaatgttaatggtcttagcttttactcagtccatttaagtgaacgtatccatcgttggtcatttgattactttcgggaggacaatttctggcaatgccgtgccaagcataaaagttgtatgcagctaggctgggcatggtggctcacacctgtaatcccagcactttgggaggccgaggcaggtggattgcatgaggtcaggagtttgagaccagcctggccaacatggtgaaaccccatctctactaaaaatacaaaaaattagccaggcatggtggcgcatgcctgtagtcccagctattcaggaggctgaggcatgagaatcatttgaacccaggaggtgcacgttgcagtgagctgaggttaaggcactgcactccagctggggcagcacaacgagactttgtctcaaaaaaaaaaagttgtatgcatctaacacaaacatagcatgacacatttaagggtaatctttctatttgtgataattgaatggattaatttttctgaggtgcttcaactccaaataggcaacaccagacctttcccacagtcatctatgggcagcagcatgactttgtaccaaacattgaaggcatttccagggaataatgatggctcccagataatatattgttgtgaaagacctttagttatttacaaaaatcacatcacccttttattggatttaagtctttttttttttttttgagacagagtctccctctatcacccaggctggagtgcagtggcgtgatctcagctcactgcaagctctgcctcccaggatcaagcgattctcctgcctcagcctcctgagtagctgggactacaggcacatgccaccacgcccggctaattttgtatttttaatagtttcaccatattagccaggatggtctcgatctcttgacctcgtgatccacccaccttggcctcccaaagtgctgggattacaggcgtgagccactgcgcccggccggatttaaatcttttaggagcccatcttcattgagatgtgagatgtatttgcgagcgtgtgagtcacataacaatctgtctatttgtaggttggagtccgtctctctggacatagccagctctaatgccatcgacctggtggtggccgctgatgtggagcactgtgaatgtccgcaaggctacacagggacctcctgtgaggtgacgcttctctcttcctgtctttttcctttcgttccttcctaaggggaaaacagtgcactgaaggggatgtcatggcaaacatttgatttttagctttagcagcccaatgtttggctcagtcttttttgggcaatagaaatattagaagtcacattgtttaaaaaaatcagattcctccaccaggaatgggctggagcaccggacaatattctgacttagtgctgccctcttgccttagtcaacaagaaacttgcaatactcatgccattgactgtgtttctaaggaggatggaacttgatcatatctgaacatttacaaatcaccagcatgtgacctgggtagctttagacaagccagccctattttgagaccttttatggcccctcgctattttactttggtgggctccaccttacatgtgaaatatatgaaaatgcgcttggaatcctcaatgaaagtaatctgttgctaaaaatattttgaaatcacttggacaaacatattgatattaataccataacaagaataggccgtaagactcattgcacaaccattacgtttttgtgtgtgtgtttctacctttaaaaagaaataaggaactggattatggtgatggttgcacagctcggtaaggtttttactaaaagtcattgaattgtacacttaaaatgggtgaattgtgtagcatgtaaatgatacctcagttaagatgtttaagaaaaaagacatttctgtactctggcaactgagcagtttctgtttgtaacgtagtggaaagaggatgactttcccttctcttgcagtcgtgcctctctggctattaccgcgtggatggaatactctttggaggaatttgtcaaccctgtgaatgccacggccatgcagctgagtgtaatgttcacggcgtttgcattgtgagtctctcactgtagttcaggtgccctctcctcctcaattcagagccatttgctgtgtacaagtgatttttttttaagtgcttcctccacggaataaccctagcctcatagaccccaaagaaaatttacagatttaagctcatgtcatgaaatgtttcccgtttttttttttgttttttttttgaaaaaagttactttggtaatagtggaaaagggatatacaacttcattatagttctttttattagattaatataaagtaattgtttttatttgctgagactataaagcaatagaaaggtaaaaaaatgttgtctacttattaaatacaaagcataggatctttagatgacagtgctaatatttatttatttatttatttgagacagggtcttaccttgtcacccaggctggagtgtggtggcaccaacactgcttactgcagccctggatcttctgggctcaaatggtcctcccacctcaaccctccaagtagctgaggccacagacaatgctagtattttttttaaatcatgatattacataatataccctaagaagaagaataaagtataatcacactcacttatataccatgctttatagttagttgggataaattaatcaaacaggtacttctttcatgcaatatgagttgaaatagggcttaagaaataggtagttaatcttgagaatgaactttggggcaggtgtggggcaagacttgtttcttaacttcaatcaggaattcttctaggccctatgccctgaagccaggccacactctggggtctcatgggtttgatcctcagaggtggagtgactgcatatgctgatcagctgtaccctggtcgcctggcagggaaatgttcatgctttttccaaaagagattgactgagtcacagagttagggaaaattaattaccagacccagggagaagatcttagaatgatgtccaggatggcttatgtccaggatggcttagaacttaatttttctttattctgtaagtaaaacttttgttttgccctttgttctgtaagtaaagcttctgtaggaattgcatgaaggggtggtttacgggcagactcagtccctccaggattgctttcctcaggtgcacagcttccaaccgcttgatgaggtggttgctttttttttcacctcctttcctttgccatttgggtttgcaaggcctcctgccagcatttggggtggggtggggtggggggtacagcaggctgtggttctgccacttatgtcttttgtagctaggctgaaagagtagatttctcatgcttccattaatgtatgtttacaaatatatattcacattaaagtgataatgctaaatagcaactggccttaaagctttaattttaataaataataattttatagctttaaacatgttttggaaataattttagacttacagaagagctatgaaagagttacagaagtacagagagttctgaagtaaccttcccccagcatcccctaatgctaccatcttgcataactagagtggagttatcagaatgaagaagtagcacgataagatgaactacaccccacattctgatttcatcagtttttcactcatgctccttttttttgtaggatcgaacccaggaccccacaccattcagtgactttgcctttttagtctcctctcctctaggaaagttcctcagacttccttgtccttcatgactatgacacttttgaagagcactgagcattctgtggaatgtcccccagccagggcttgtctgatgctttcttatgactaggttgaggttacacatttttgaccagaagacgtggaggtgccgtgccctctcattgagagcagatggataggatatcattgtgtcttcttcctggggatcttaatctgggtcacttgaattaggtgatgtctgctaggtttttccactctgaagttactatttctcccttcttaattaatgtttgagagggcaaaaataataaaaatttaaattagaatttaaggaaatacaaaaaacgtggtagcatcatatatctgttaaatctaaccttgctggtttttttttttctaatatattgtaaaaacaagcttgaattcttccttttgtgtagttgttcatagccctgggccttgcgtataactatctagcttccaggagttaattctttattcacagttcattagagatgaggttccagttgctcttagagcccctgtttttctctctgagctctcttagctctttattcaaaggagaagtctgtgtattttccttgcagcttggcatgatttagaaaagagaatggcatcacagtaaattgtgcatgtcttgggccctcatgtctttcttttttcaatcgaaagatgtttttcctccccaaggagaggaatagtctcattccttcacataccagattcaccaacagggacagtcaggtaaagggctggtggcacacgcctgaaaaagcactgaaacagaccctcagtgggtttttcaacagaactacatactagtttccccaaagagaaagaaagcactatctgactccttgatcaaagaaaacataccatagacatgttccaaatgagcattatcaaatatttttaaaatgaaattgcagttactctgcagaatacttttagctcaaccatgtaaccctttactaagaccagttgcatcttgaattaatttggattcattatcaaacccaaggtcctatgaaggatgggaaggaaaaaagggtctaagactctgttgtctgaggaccagcagtgtgggcatcacctgggagcttgctagaagtgcagaaactcaggccccacctcagatcccctgaaccagagtctacaggtaacccaggtgcacttattaatagattcatattccagtttagatgctctggtctaggataaccctaagtaaaactgatgaaaccctggagtaaaatggatgtaatacaaatgcttacaattccaaattaaatgtggtatatgggaaaactttcatcaacctgaggaatgatggaaatgtatatggtttagaaactgaaaatactaaattgctagatgaaaaatgaccaatgaaagtatgtaaaatgagtggccgtaggagaaggggacacggggaaatgggagctgaggtgcacaccaagaggagcagcgacacacgtgtgcagaacaagccccgctcccttcgagcccgtagctgcccgggggtcagtgctgcctggtcctggccccagtgccgacctccgcacccctcccctttgctcctgcacacctcctaaccaccgactgcactttcttttagaatgttttaaatgagggggggaaggtttttcatattttttcatgtatgtaccatttccagtgctcttcattcgctggtataaatctatgatttcgtctagtaggtatcacctttctacagcctggattgttagcctttctgtagtgcagatctgctggttgacagattctcttaactctcctttatctgaaaaaggcttgccttcagttttgaaattgatttttacagatttctctttcagtactttaatattgttctgttgccttgtggcttacatggcttcaagtgagaagttagttggtggtcatctgcttatttctgtgtgttattctgccttttttctctgcctgctgttaggagggtctctgtgtccctgggtttgaacactttgactgtgccttggtgtgtatttctttatgctggggtttattgagcttctagaatttgtgagtttgtagctatcaacttatgaaaagttttgaccaaatagcttttcagcttcccacgccaatctaattgcacgtgacattgatccacagatgatagaggctgggatcttttgttttttcctgaagtttgagtttctgttgttgtcttcaaattcactagtcttttctcctacaatgtcgaagccgatgcccacccattcagtacttcattttggatatggtagcttctagttctagaagttctacttggtcctactttatatcttgcatttctcttttcacagtttttatgtttccttcaagtctttgagcatgcttataatagcttttttgtttttgttttgagatggagtctctctctgttgcccaggctggagtgcagtcacgtgatcttggctcactgcaacctctgcctcccaggttcatgcaattctcccacctcagcctcctaagtagctgggattacaggtgcacaccaccacgcccggctaatttttgtatttttagtagagatggggtttctccctgttggccaggctggtctcgaactcctgacctcaggtggtccacccgccttggcctaccaaagtgctgggattacaggcgtgaaccaccgcgcctggcctataacagtgttttaaaagcctgccaattccatcatctctatgatttgtggacatgtttctaatgactgggttttgttttttttttcccctgattgtggatcgcttttttttgttgttgttgttgtttctcatgtctagttattttcattccccataaaaaaaaacccagctctttatttggaaataattaggagtttacccaagatttgtaagaataagagtggtacgtagaacacctgccatttatctagactcccgtgttgttgccattttccccatttgccttattaatatcattatctgtctacctatctaattatagtatgtttttctaaactccttgagaatagtttgcatagacaatggccattttggtgtgtatattgcaagaataaggcttgtctcttgtataaccatagtacacttatcaacttaagtcaatgtaacgctggtactctactttttctaacctaccacctgttgctcagttttgtcagttgacccaattatgtcctgtatagcatccttccctccagcacaggcccccatctaggatcagatgttgaattttattgttgtgtctccttaggcttttaacaggaaatgtttctactgcctttctttgtattttatgctattggcattttgaataatataatcttttttttttttttttgagacggagtctcgctgtcacccaggcagtggcgccatctcagctgactacaagctccatctcccaggttcacgccattctgcctcagcctcccaggtagctgggactacaggcgcccgccaccaagcccagctaattttttgtatttttagtagagatggggtttcaccgtgttagccagggttgtgttgatctcctgacctcgcaatccacctgccttggcctcccaaagtgctgggattacaggcatgagccaccgcacctggccgaatatgatcatttttttaaaaaaatacaatgtccttggttctgggcccttcttttgtttctcttggattattcaggccggaatactttgtcaaggatgagtctctcagagcactgccaatgggagtcccagtgtctgtctggccctcactggtgatattaattctgattacacaggcaaggtgttggtcaatttttccactatatatgaacgattctttccttttgcaactaaaaaacagttggaggcggacactgtgagaccacgtgcatatcccactcttcatcagaattccccttagaggtagcagtcggaaggttctggccgaagcagcacttgctgtcatgtttgcaaaagcttgatcctccatctcctgcccttgtccatgctcatcagtcagagagaaagctctcagatttctcatttatacaaattacacttgctgatattaatctgaaaacaggaggccttcctcatatagctcagaggttggtgactggttttagcattttgtcttttttttttccgcttggacttcaagttgcttatagataaatctgaaaatcctttaagacaacctgagctgattcttctggtgcatgttcctaggcgtgtgcgcacaacaccaccggcgtccactgtgagcagtgcttgcccggcttctacggggagccttcccgagggacacctggggactgccagccctgcgcctgccctctcaccatagcctccaacaagtaagcctcggacctcatcagcggttcctgccagcatggccaggattcccacccagatgcgtactaatgacttcagagcaagactgtgtgtgtaatacgtgtgtgaattttgcccagtgacaattgatttggattaaagacagaggggtgggttattttcttgtaaaccaacgtttggcttatgaaagcaggcaagaagaggtgtgtgccagcaaggacctatacacgccgttttccctcttgattcctcttggtcatcagttgtttcacaagtatatgttgtctacttaccagtgggctaggaggtggagggatacagagaggaataaaacattgtccctcgacttagggagtttttgatctaatgaccaaaatatgtacgcatgaggctaaacaagagcagtctaaatccattcattgattcaacagatatttatggagtgcctactgtgtcctgagttttacagcaggtgttctgaatagcaaactgttctcacctggccgtgggccccaggggactcagtgtggtcgtgactgtagtgaggcctgtccaccagatggtggggaggagggagagcagtgtccagcctacctaggtgggtgcaggaagctcttctctcagatttgcaggagaaggagtttcacaggcagcatagacgggcgttctaggcagatggagctgggcgtgccatggcatggcagcaggaacaggcatcgcccatttgaggaactgcagcaggccatggaacagaaggcatggagggaggtggaaggagatgtaccaggcaaggtcttatagtcacactggggcaagtgcatcccacaggccagcagcttaaaagcctctgtctctcgctggtttaacctttagaactcttccttcacccactctcaaagaattcccagtatataaaaaggatgcagtcagggttactcatgatgaaattgggggtgggtactgtcatccaccctgcacaggatcctcaaggtttaggaatagggttggaaggggcatccgttagcagggggtccctggagaggtgcgagagcctcctgaccactttgtgtttgagtgagctcacttttgccctggtatgggcagtgctctgaggtgggaagtcagtgccagggaacccgagctggggaacccagcatcctaggagcacccgagcaggcctcctggaggaagcatcagctgagttgggcactggggctgagctgggttaacccaggcagacagcgagagaagcaggcgcgctgtgggctgagaatgagaggagtagggagcagggagtgaggagtgagtgtcagtgcctggatcatgggaccaggagtctgtgaggggttgagactcacagggtgggctgggtgaccagaggccccggattctgagctaaggaggtctcattgaaggtctggaagcacaggagtagtagaaatgaagcattttaaatagttagaaattcggcttcatccattggaaaattttgttcatttctaatgttttgacagtttcagccccacctgccacctcaatgatggagatgaagtggtctgtgactggtgtgccccgggctactcaggagcttggtgtgagaggtactctgcatccactggcttcaacacattttcgaaattaaatataaattctatgtgtttatttttaaatgcgtagttaagtgtggttttggagttttgatgcataattgttatttcatagaatcattgagaaaaatcagtatttcatgttttaaaattaatgttaaaccttactgggaatttttaaagaacggtactcttttcctggctaatctgagttctcatcaagaacaataggccgggtttggtggcccacacatgtaatgccaggactttgggaggctgaggcaggtggatcacctgaggttaggagttcgagaccagcctgaccaacgtggtaaaaccctgtctctacaaaaagaaaaaaaaaacaaaaggccgggcatgacggcgggtgcctgtaatcctagctacttgggaggctgaggcaggagaatcacttgaacctgggaggtggaggttgcagtgagtggagattgcgccattgcactccagcctaggagacagagtgagactctatctcaaaaaacaaaacaaaacaaaaacaataggaagcagcaaggagtcggtatctgtggttcacacatttgaatattccattgctccgggctgttctggagatgacaggtggtttgctttagtagccgtcttctggctcctgaaggccagtgctgtctttcctatgtgtgcgtctcagtgcccagctctggctgagcctgcaggaggctgtgcggcatccggagtggtcaggggtgggtcagagttggccctggaaacaggtgcatgtcccctggatttatgcctcattttggatgctctcccccttcaccgcgacaggtgaaggagatctgggaatgcccgagtggggagtcatatccctttcacagtaaatctcagggaacagagtccgtctgatttattagccattcagggagtccctggatagtgcggtaaggccttaagtaactgcatttgtctgatcccactttcaatctttgatacagatgtgcagatggttactatggaaacccaacagtgcctggcgaatcttgtgttccctgtgactgcagcggcaacgtggacccctcggaggctggtcactgtgactcagtcaccggggagtgcctgaagtgcctggggaacacagatggcgcccactgtgaaaggtgtgctgacgggttctatggggacgctgtgacagccaagaactgccgcggtgagtgcgtgagcgtgaagtcaggtcagctgtttattgccataggaagtcttcaaccgtatagtcacatgtgtcacacagggccccgcctaggaggtcacactctcttgaggggttacttgcattaatgctgggtctctgatcaaatacagacccacgacccagttcttccctagctaccctatcctgagcttggttagtcataacccataggggtcagtggcctggaaagatgcagcctgccacccgagcggccagtgtgacttgacagagttccggctctgctccccgtgactgaaatgaaagtggggaagctcagagcctgtcacattcgtaagggagatgcttcagaggctgcacgaggcagatgggattccaagatgaagggtgggaaatggtaagactgtaaccccagaaactgcgtaaagcaccgtgtggtgcatcttagccctctgtgccagaactgcccgacccctatggcactctgctgaattcgatccttgaaattatggatcgtggagaaaactagattctcctgcacagcagatgacctggccggagggatgattcagccctcagattttgaaggagtgaaagaacaaaagtggcaattataaattattttgagtatttcatataaacgccagtcatactatggtactacgacatggggacacaagagggcaccagctgtacagaaaacatactttcccaggcacacgtggagagattggaaatgttttatggccctgggccaatcaagctgatctccagcaggtggccaccttgactggctatcataccaggataattatgataacagcatttctacaaggcttcacgatttgtagaatgtttttatcattttcatgtcatttcttttcatcattactgcaagccttggtgattcattcctccgttcattcattgtttattaagtgtccggtatttcccagacactgtactaagaactgcgacaggtagttgggaaattgtgattcaagtctactgggaagctacacatgatgatggtatggggggaaaacatacctgtggatccaggtgttggagtctcgactaatgtgagttttattccaggaccaactgtgtgacattgggctaatttattagcctctctgagccactattttgttattcataaaatagacataattatatgtgtatatcaaggcctttctgagaagtcagtgcggtaacatttaaagttctagacatgaaataaatggcagctattataattactagtaataaaccaattattattatattttctaatatataatatatataatataatataatatattattatattatataatatatattatataatataatatattattatattttcactccactgctgtccaacagaaatacaatgtaaaccacccatgtaatttaaaattttttagtagtcacatttttcaatagtaaaaagaagtaggtgaaatgtattttaataatacattctatctgagctgatatattaaaaataagcattttgtcatgtgatcaggttttaaaagtattaagcaatatttactttcttttttagtactgagtcatcaaaattgagtgtatattttatagcccagctcaattaggatgctacattttcctcagaaatacttgatctacatgtagattacagaaaatttacaattgaaaaggtagttcaaacatatttaaaatttttccgtcctgtaccaaaaattattttctttaatattggcatccacattgacaaaaccgcttcagtatttaaatttaaactcagagatttggttcttcgcttgcatcagccacatctccagcatttggtagacatgtgtggttagcggccacaggacaggactgtgaaggtcaaggcgatgaatgactgtcgggggttgcacttgaaggcacggaggcgggcaggcccatcagcccagggtggcccgggctgcctcctgaagggggtgctgttcatctgagacctgaaggatgggaagaagagccccaagaagagtgaccagcgtgggaagacgggcccaggcaagtaggcaggccctgcccgaggtagacactggagagagagtgaccagaatggaaaagacagagacagggaggggaggtctcgggctgataggtgggaagcagccacgtcggaagggtctcctgtgcagtgttgaggtgctgaggtcacctcgtcctccctgtcctgggactcaccagcaacttgtgcagacatggagtgggccagggtgtgattggagctgtgtgtttgaatatcgccctgctgccagcgttgaggagggaatggctgccaggggtgttgggttaggagacaagacccgaaatgaatctttctggtaagcattgatgagggcttcaggtagggcctttgccatggagataaaagagaagacgtaaaataggtcttgatgacaggttggaaggtggaggaaggacggttagagcagctggggtttgggtctgggcctgggctagtagggctgatgctgaccaggctgtctctggtttctgaacacttaacagcttttatcctttctcatcccttctctcgcatcccctcgcttcgatgagacaaagtcctgtgaactgtttctgcatatcccacgagcagtccttccatttctataacagggttccctctgtggacttcttgtagggccccccattcttatataatactatagtctgttaggttaaaccaagtgcaagtgccggtgttgtgtgtgattgaccttctctaaagcaagcgcgtatagttcaacccagtatttatctgtttcccctcaccccccataactctcactcacttgaagcttggtaggaggagaaactgatcgtcaggttcacctcctgcctctgctgtggggcagcggctgcagccggaggtgtggacaggccgtccaggtagagtagagcactgagggagatgagggtggtgagaaacctcacagaactctaatattaaaggactcttatattaaataagttaaatgaggataatttttatattgtgagctactcctgagaattaaaatatatataaagtacctggctattcagtaattggcctaaaataacactattttaaattagtactatttataacataaatactattttaattaagaattactataataggccgggcatggtggttcacacctgtaatctcagcactttgggaggctgaggcaggtggatcacctaaggtcaggagttcgagaccagcctgcccaacatggcaaaaccccatctctactaaaaatacaaaaattagctgggcgtggtggtgagtgcctgtaatcctagctacttgggaggctgaggtgggaggatcacttgagcctgggaggcggaggtggcagtgaactgagattgcgccacggcactccagcctgggtgacggagtgagaccctgtctcaaaaaaaaaaaaaaaaaaaaaaaaagaattaccataataattattactgcagagagagaactagtaatagcagtgtgacctatggaaagttatctaatctttccaagttgtagatttcacaccgaaaatagagaacattatttcgcctccctccttggtttgtggtgaaagtacaaagaaatactgaatgtgacaggcacagactaacagacacatcatacagtgaatatgattttttaaattatcatcaatagtttacattgatcatacttgcattgaactttaaatattccccagagaaagaggcggcttgaaatgaaacacggaggggagacacacgagaaacaagagggagggcaggagagtgggcgtcccaaataccacaggaagagggcgatgcaaaagggagagggaggtcacggggtcccttccgcagagccacggggtaagagggggaccgaagtctgctccctgaatttggtgcctgggaaatctctggagactttagggagaacagttgcagcagacaaggggccaggaggacactatgcgaaacttggattggacggacgtgccagggaggtggatgttctgatggaggataaaagggagggggtgtcttgtgtttgatgggggcagtggagaaggatgtgctggggagttagcagcagagtccgcacggtccagctacggggttgatggagcaagtccctgaagggcaccggtgaatggggcctctcgtgggactgcagcattaaggcccccactccaggaaaacagacggccagcctggcctagatcatgaaggaggcggatcccagcacgtttcctctgcccctgaccttcccatgtcatgtcccatgtccagcactcttgctgcagcctccaggtcgtgtttaggccttccattatttgtgaagtttttctctcttttttcttacattgttatgtcatgacacacactgtacatgttctgagtccacacatttataaagagtgcctgggggcccggcgcggtggctcacgcctgtaatcccagcactttggaaggccgaggcgggcagatcacaaggtcaggagatcgagaccatcctggctaacacggtgaaaccctgtctctactaaaaatacaaaaaattagccaggcgtggtggcaggcgcctgtagtcccagctactcgggaggctgaggcaggagaatggcatgaacccgaaaggcggagcttgcagtgagctgagatcacgccactgcactccagcctgggtgacagagtgacactccgtctcaaaaaaaaaaaaaagagtacctggaatattttgtcaggcaacatattaaatgttcttttttttttttttttttttttgagatggagtttcacacttgtcgctcaggctagaatgcagtggtgtgatcttggctcactgcaacctccgcctcccaggttcacgagattctcctgcctcagcctcccaagtagctgggattacaggcacgtgccaccacgcctggctaatttttgtatttttagtagagatggggtttcaccacgttggccaggctggtcttgaacgcctgatctcaggtgatccgccttccttgtcctcccaaagtgctgggattacaggcatgagccactgcgcacagccaacatattaaatattctaactgaagtgcttattaagggttcccctgtgaatattgattaaatatattttggacccgtaagattgtatcactttgcaaaggtagggaactttgtagctttaagcatcaatgttgtaactgtagataaaatggaaccatctgacctgaaactacaaatgactcatgacttagaactgggatatcatatttaatgaaaagatatttttcattaaattatgaaatataatattaatatgtacttatttagattacgttttaactgagctttaaaatattgaatatgtacctgattggaatcagggcaaatggctaagttgattttgaaatctccattgcatgtttttcatgggaatttgtagctcatttaaaatatgtcgaggaagtcatgaaattggtgaagcgaattcgctaattattgtcttaatagcttcaatgtgtttttcctgtgatggatccttccactaaccctgtttcagtttactcttcagaaaaatgctaaacttctaaagttattgccaataatattatttttagttttgtgatttgaaacattgaaagtttacattttttttttcctttggggatgacggatcttatgataaccatcctcagaagtgagggttaatatgtctttgtgtgcatgtgtttagcctgtgaatgccatgtgaaaggctcccattctgccgtgtgccatcttgagaccgggctctgtgactgcaaaccaaacgtgactggacagcagtgtgaccagtgcttggtaagatgcatgtgactaattgacaccttagccttggtacagaggcgattgaatccatgactcagaaggagctaagtccccaagtgtattagtttgttctcacactgctatagagatactacccaagactggggaatttatcaacaaaggaggtttgattgactcacagtttcgcatggttggggaggcctcaggaaacttacaatcatggtggaaggggaagcaggcaccttctttacaaggcagcaggagagagtaactgtcaacacttataaaatcatcagatctcatgagaattcactatcaccagaacagcatggggagctgcccctatgatcaaatcacctctctcctttgacacatggggattacaattcgatttgagatttgggtggggacacagagtcaaaccatgtcataaagtgtggctgacaagtgccgtgcctgtctagagagtggatgtttgctataaagggatggggatggtgtcatgaatactttatgattctatgaaataccctgtgtgtgttctggaacatactaatatgaggagtcatttattaaaacgtatgttggtttccactttctccccctttggtgaaacagcatggctattatgggctggactcaggccatggctgccggccctgcaactgcagcgtggcaggctccgtgtcagatggctgcacggatgaaggccagtgtcactgtgtcccaggtgtggcagggaaaaggtgtgacaggtgtgcccatggcttctacgcctaccaggatggtagctgtacacgtaagccttgatttccttgtttgagactttgtagtcattcccagagctttccttgggccctccctctacttccaactaattttggttaagtgcctttactttttctcttctttccctggaggatttcataccttttttctggtttctggtccctatcagggtacaagcctaagttttggtcatggctctgccgcctactaattgtgggagcttagattcattacttaactttgcttggcctcagtttcctcatctgtaaaatggggatgctaatgagaatctgcattgagaagttagtgtaagtgttctatataaagtcctcagcatggcattgggcctgcagtaagtgcttagtaaatattggctccctctgtgatcacctagtgagggctttttcactcttttctctatttcccctgtcctgtccccatttccccgcttccctcagcatctcctgagatggagggccggctacctccatgagacatggaggggtcttgggaattgtgaggcgtcttttaggagtgagaagagtggcttggactcttaataaaagggaaataacagcatcagctcttagccctttaatgacatcacccagatctgtaacccagcattcatctttatttcagcctgtgactgcccacacactcagaatacctgcgacccagaaactggagagtgtgtctgcccccctcacacacagggtgtgaagtgtgaagaatgtgaggatgggcactggggctacgatgcggaggtggggtgccaggtgagcactgtcatccacgctcttgcttaactgagagttgctttgctgtagcaagtttcaggcctgttcttctatatattttctggactttaatctgttgaatagctttgtgaatttaaaaaaaaaaaaaaaactcaatgtgggccaggcacagtggctcacacctgtaatcactgcactttgggagactgaggcaggaggatcgtttgaagccaggaattcaagaccagcctgggcaacaaagcaagaccctgtctttgcaaaaaataacgattaaaaaaaaatttagcctggtgtggtggcacacgcctgtggtctcagctacttgggagactgaggcaggaggatcacttgagcctagggattcaaggctgtagtgagctgtgatggcaacactgcacttcagcctgaacaacagagaaagactctatcttaaaaatcaaaaacaaaaacaatacaccttaatgcagatgataggaatcaaagtggaagacaggacacccttaagacaccttattctaggttttcttcaagaacctagttgttgcattgatggttagaaaatccaaaaaatggctgggtgcggtggctcacgcctgtcatcccagcactttgggagaccgaggtgggcagatcacaaggtcaggagattgagaccatcctggctaacacggtgaaaccccgtctctactaaaaatacaaaaaaaattagctgggcgtggtgatgggcgcctgtagtcccagctactcaggaggctgaggcaggagaacgacgtgaacccgggaggcggagcttgcagtgagccgatatcgggccactgcattccagcctgggcaacagagcaagactctgtctcagaaaaaaaagaaaagaaaagaaaatccaaaaaatatttgagtgtcctttaataaatattgtgcaatgtatactatcttccaagagaaagtaataaatcactttattgggggtttatgtccaaaccatgaggcctccagttttctatgtagccttcttcagttaaatttgggtatagtttgtgttttggaaacaagaggaaattactttttttttttttttaattgagacaggatcttactctgtcacccaggctggagtgcagtgacaccatcaaagctcactgtatcctcaaagctcactgtatccttgacctcttgggctcaagcaatcctcccgcttcaggcccccaagtggctgggactacaggcatgtgctatcacgcccagctaattttttgattatttgtagagacgggggtctcactatgttgtccaggctggtctcaaactcctgggctcaagtgatcttcccacctctgtatcccaaagtgccataattgcaggcgtgaaccactgtgcctggcctgatttctacagtaatttcgttagacttgttttgacctagtagatttaatttcagttcacaattctggccccgtgcgcatgtgccactaagatgcacagatttccggcaacacaatgcctgtctcctgttggcacatggcaacgtgaatccatgcagcaatagcaagagagagatggttcatttgtagaacttccccacatgtagtgttttcctgtaattcaaatatgtgtgcatttggaagcatcaaatctgcctttttaattgagttggttttcccttctctcaggcctgcaattgcagtctcgtggggtcgactcatcatcggtgcgatgtggtcaccggccattgccagtgcaagtcaaaatttggtggccgggcctgcgatcagtgttccttgggttacagagactttcccgactgtgttccctgtgactgtgacctgagggggacgtcgggggacgcctgcaacctggagcagggtctctgcggctgtgtggaggaaaccggggcctgcccttgcaaggtatttaccatccatcctcctctttcatcctgtctctggctcctcatcatgactcctgggctttgactacttacctaagcagccaggttttggatgcttttcctagtgagttcacactcccttccgcatctgagttcaaagtctcttatgctcctctagagtgacggatgatttttgaaattgaatttttactgttactagtgtcagttgatggaactgatttgaaaactgccctgaagttttaatcatatatcccagaggctgagtggctgcgtatcttgagtatgcaggtgaggtgggtttctcagggcttcgggatttgtgatgtgatccctgtgaggttattgggctcccgtatgtgctggccacattgaaggaaatcggggtttattattttcccaagaggtaagacttcaatgtcattataagttttgtgtgtttccgttagttttcccaatgtgctttgctattaggaggtcagagccacctcctctggtccttttcccatgggtggtgagatgggagccctctggcttgatgatggtaatgagctgatgggtgactggagataggaaggaaaactcatgtacatatcatggcctgggagtaatggaagcatcagtctccccgttttcggccttatttatttatttagagacagagtcttgctctgtctctcaggctggagtgcagtggcacaatctcggctcactgcaacctccgcctcccgggttcaagcaattctcctgcctcagcctcccgagtagctgggactagaggtgcccaccaccacgcctggctaaatttttgtatttttggtagagacggggtttcaccatattggccaggctggtctcgaactcctgacctcaggtgatccctctgcctcaacctcccaaagtgctgggattacaggtgtgaaccaccgtgcccagactctgccacatcttatgataacagctgtgatgatagacgagtagagcagcaggccttgtcttaataatcacctgggccaagcacggtggctcatacctgtaatcccagcactttggaaggctgaggtgggtgaatcacttgaggtcaggagttcgagaccagcctggccaacatggcgaaaccccatctctactaaaaatacaaaattagctgggcatggtggcaggcgcctgtagtcccagctactcgggaggctgaggcaggagaatcgcttgaacccggggggtggaggttgcagtgagccaagattgtgccactgcactccagcctgggtgacagagcgagactctgtcttaaataataataataataataataatataataataataataataatatttatcacctggccggtggctctcacacccagggatcatcagaatcacctggagactcgaggcggcttccagagttgtctcgggacattctcatcagggactctgtattttccaaacacttccaagatgattctgttaatcatctgtgtttgagaatcactgattggatctttgagaaaactgacactcagaaagctccgggcctggctagaggaaactaatgtttgtgcatctataattatgtttaaaattatgtttgtgctctattttgtctctgtttgttcagaaatcacatctcttttttaggcaaaaacgagtcctttatttgctcccctgtaggaaaatgtctttggtcctcagtgcaacgaatgtcgagagggcaccttcgctctccgcgcagacaaccccctgggctgcagcccgtgcttctgctccgggctgtcccacctctgctcagagctggaggactacgtgaggaccccagtaagtcacacacagcgaaagtgttctgcttctaaccccactcccctgggaggtgggtgggggtgggaaacacagccaagtgttcacattaaattttgctcttatggcatccaaaattctaggaagctaatttgggttagaacaggaatcagagctcagcttctgctggccgaggaagtaaatggagcttgaactaaaggctgtccatgttgttccttagctaatctatgaaaagctttcattggagagaagatagaactgcaaaatctcagccgtcttctgcatatcattgaacgtttccccagcgtagcaacagtttggccctaaatggcagtagtttaaagcactttcagttcattttcttccagatgtttagtttaaaggaaaagtctttactgtttctgttttaataatgaagctgtttcatctgtgaaacaatgatggaatctaaagaatgaaactggagtggaaagttcgcattttgaagtgcactttcccctcctttcgtggtttaggtaacgctgggctccgatcagcctcttctgcgtgtggtttctcagagtaacttgaggggcacgaccgagggggtttactaccaggcccccgacttcctgctggatgccgccaccgtccggcagcacatccgtgcagagccgttttactggcggctgccgcagcagttccaaggagaccaggtgaggtgcacgcccagccgagagccagtcggtgcttcctaggatatacagaaattgtttaaaatcaccatagtctgggccggcctgtcatttaaagaagtagttattaatttcctcttttaagtgggatcagagaagtttaatgctcataaaagtctcctcaaatatatggttccttaaaatttttcattaattttaaaagttttttaagttcacgttatattaatttggttcttcctaaagcagtcattcaacagacatatacagtcatgtgtcacttaacaatggagagacattctaggggaatgtgtcattaggtgcgaaagttattattataatctcatgagaccatggtcgtatatgtggtttgtcattgactgaaatatcattacgtggtatgggacccactgtgtttactgatatgctcttggtacaaacctaggtgctatggcctgggagtcccttttcaagaaattatcactcatttggggggaaaaaactactataaaagatcatgaaaggcatcacttggatttttgtttatataaacattggagtctgtgtgtgaattcaccctgatctttacaatttgcaaatatgcacccagtgctcctggagatagagaaatttttaatctaaaggagcttgaaaataatttgcatcactaccacattgatttgttattttggagctcacttttgtttgttttctcgaaaggaactatataacttaggtcaacttaataatccataattaaatggaattagaaggaagcaaattccagacaacaaatttcacccatgtgatgtatttttaagatacaagatttctctcttatggtggcagtcttgcaataaaatgtttttgaatgaaagctttgtcagagaagtaaacaacactttattatttgatagctcatggcctatggtggcaaactgaagtacagcgtggccttctattctttggatggcgtcggcacctccaattttgagcctcaagttctcatcaaaggtggtcggatcagaaagcaagtcatttacatggatgcaccagccccagagaatggagtgagacaggaacaagaagtagcaatgagagaggtgataatgggatcttttcatagaagttccttaaagacattgactttgctatggatgtagtgaaagatgaaagccattaataagagaatgagcagccaggtacggtggctcacacctgtaatcccaccactttgagaagccgaggtgggtggatcacctgaggtcaggagtttgagaccagcctgtccaacatgatgaatccccgtctctactaaaaatataaaaattagccaggcatggtggcacacacctgtagtcccagctacttgggaggctgaggcaggagaatctcttgaacccaggaggcggaggttgcagtgagccgagattgtgccactgtactccagcttgtgcgacagagagaccgagcaagaagaccctgggatcaaaattccagtgagattagcaagatctccaaaaacagtttgaatttcaaattctcaagaaatgtatattagttttatgtcaatttagtgggcactgcatcttaaattctttatcttggcgtactattttcaacctgcatagagatagtggtacaggagactttggacttgctcagatttgggaagtgtttattcttccagcagatgtttactggatgtttgctgtgtggctggcactgccttaggtaatgcatatctattgataatggaactgacactgcgcctgtccatggaggtttcaggaggtctttgtcagttacactcagtggcatgcacagaacatggctcatttctggagaaatttataaaagaatttattctttataagttttatgcctgtcagaatttggcctctgagcttaattgaatgtgtttctcattctacagaatttttggaaatattttaactctgtttctgaaaaacctgtcacgcgagaggattttatgtctgtcctcagcgatattgagtacatcctcatcaaggcatcgtatggtcaaggattacagcagagcaggtacttggagcttctagaattttgaccgttattttcatatttgaaagcaaactgaaagaatttgactcacttcacttccattacctactatttttattaatccatgtagttcagttccttaccaaaacattgttaaatattaatatcattatggaatgtgcgaattataacttaaagtatccacctagcatgctaatgtcgatataaaatataaggacataatgttggaatcttagctgaagataaaatgcaaaaaaaacaattgctgtttctgcacatgaaaactgaaatgcccatgtcttcgtagtgatgtataaagaatgctgtcacctactcatctcatactttagcccaaaaagaaagccattaggtcttggccaaatcagcacttcaagaggtcttttaggtgtacttgtgtcacattatttttaaattctaaaatgtctaaagtgtgtcatgacagttagtaatgtgctttaacacacttcacttacaatcacaagcaggaactactccaaacagggaagaaagctctggtttcatatatatgcaagtgttaggtcatgtgctatgtttctagaaagtttttcaaatgttagcgtttcctctcttaacatgatggctgcacagaatctcagacatttcaatggaggttggcagaaaggctgaaaagctgcacccagaagaagaggttgcatctcttttagagaattgtgtctgtcctcctggcactgtgggattctcatgtcaggtacggagactctagtcgaaatctatttcctgggtttgagttgaaatgtgcttgttacagcaactcccagagatgaacagaacttatgtgtatctactatatcatttttttctctttttgaattaaaaagaaattaattttggtaaaatgtacataacaaaatcttccatcttaaccattcttcagggtacagtttagttgtgttaagtacagtcacgttgttgtacaactgtcaccactatcatcctcagaactttttatcatccgaaacgcaaactctgcactcattaaacactagctccccatttcctctctccccagtgccccaaaaccaccattctccttttggtctctatgtatttgaccactctatggccctcttatatgatatatatatatgcatggcacatgcctgtaatcccagctactcaggaggctgaggcaggagaatcacttgaacctgggaggtgaaggctgcagtgagccgagatcgtgccattgcactccagcctgagtgacagagagatactccgtctcaaaaataaataaataaataaataaataaataaataaaagtggagtaatacagaacttgtctttttgcgaatggcttgtttcacttagcataatgtcctcaaggctcatccatgttgtagcatgtgtcagaatttccctcctttttaaggctgaataatattccattgtacatacatgccacattttgcttattcgttaatctgtcagtgaataaacttgggtggcttccccatcttggctattgtgaataatgccgctatgaacataggggttcaaatatctctttgagattctgcttccagttcttttggttgtgtacccaaaagtggacttgcagaatcatatggtacttgtattttccatctttggagggatggaaatggtatagctactggtttttcctgtgccattttccattctcaccagcagtatacaaggtccagtttctcaccaatacttgttagttttttttttttttttgatagttgataccctaacaggtgtgcggtggcatcaccttgtgttttttcatttgcatttctctgatagagatgtcgaacttcttttcacatacctgttggccatttgtatgtctcctttggagaagtgtctattcaagtccttcactcactcattaatcagacttttttgtcctcccttttgcaccccctcaggactgcgcccctgggtaccacagagggaagctcccagcagggagtgacaggggaccacgccctctggttgctccttgtgttccctgcagttgcaacaaccacagtgacacctgtgaccccaacaccgggaagtgtctggtatgctggtttgtgggggtgcttgcctgagtttagaagtaaagtggacgctgagtgtcagatttccggtctaagtcatagccgtgccttggtttagtgagaggttaaatttagctaaatataaaatataaacctatttccttgaggacggcatagcttagtggttctgaccttatcagtggaaattcttttataaattttcctttcttgatgaatttatctgtgggcatcaatttgggaattatagtcgtgcaccaaataatgacattttcatcaacaacagatcacatataggacagtggtctgataagactataatactgtgtttttactgtaccttttctatgttagttatagttagatgcacaaatatttcctgttgtgttgcaactgcctacagtattcagtacggtaacatgctggacaggtttgtggcccaggagcaataggctctaccatatggcctaggcgtgtagtaggctgtgccatctaggtttgtataagtgcactctatgacgttcacaccgtgacgaaatcagctagggatgcatttctcaggcagtatccccatctttaagtgatggatgactgtagttgcatgccttgtttttaattgcagtactggttgccgtagtcaaaatagatgagaactgtatacgatgaagtttgggggctcacgtgggaattttaaaataagttaatgccagtgttgaaaatgtatttctctgtgtaaagtattgccctctccttgcattttttaaaaaaatgcatattctctaggggatgataacagcacattattcacatgttagtgtgtgtttgcttctcagccaccttctcctaggccaagattggtctcggggacacatggagagctctgaccactgtaaacgactaagcggcccagacagaagcctcgcagccctgaccgaggacaaattcctgtgtccatgatttagcttaagccaatgaggcagataacaaaataatgtgatattcgtttcctactcctgaagcctcatgctttacagtcactcaggtggaaacattgattactaattgttccaagattaactcgccttgggtaaaataatgcattgaagggaaatgagctgcccaccaaggacacacccgaagcctcggagatcctgggtgtggcccaatcacaaggaaacactggagccaaaacagaggaattaggactgcaggctcccaacctgcctcccgccacattttgattctggttttccctctttttgacaattcctgtcactgaaacccattataaacaaaaaatggtgtctgggcttggaggatgggatttcagggttgcagtggtccttctattcttgtcagagtcccttcacatttttttattattattatttttttcaagatggaggcttgctctgtcacccaggctggagtacaatggcgcagtcagctcactgcaacatctgcctcttggcttcaagcaattctcctgctcagcctcctgagtagctgagattacaggcgcctgccaccacacccagctaatttttgtatttttagtagaggcagggtttcaccatgttggccaggctggtttcgaactcctgacctccaatgatccacctgccttggcctcccaaggtgctgggattacaggcatgagccatcacgcccggctgtcccttcagatattaagtctgaactatagcagccatgccaggcagtaatttagtgtacattttacacacctgcaacaatggggagctcactcccaaaacagctctgctcatctttgggcagctctgattctttctaagccagtgcccctgaccatgcatctgttggtgcagttttattctttggagctgttgagataaaccatgagttcagattattcatgaaaagtgatgggatcttaacagataccttgtgaaactacttgatcaaatccctctttcccatgtccaaaggccctgaatcttcagccctccaagtcacgtaccctcacatgcctggaggccagatggagtggtcgtgggtccgttcaccagcctgtggtgtgcatgtcactgtctgtcttcggtatcctgccctgagcctaacgcctttgctcccagagtcagtgggagcttccctccttaactcgaggtgctgtgtctccatggcccagcctggacagggtagtcatacctgccctgtcactgctgcctcacggcattgactagacacaagacccttgaactcttcccatcaatatagcgcctcagtcccttcttccttgctctttgagctcaggaccttcccttccatcctcagtttttcaaatccttttgtggtttagtgcagttcatttcccttcaacataatctcctaagcactccccctgtgcttattgtacaggtagatatgaagacctttttggatctgattttgtcattagtatataggatgttcaggtcactgagcatttggtgttatcataaaaatgattggggccgggcgcagtggctcacgcctgtaataccaacactttgggaggccaaggtgggcggatcacctggggctgggagtttgagaccagcctgaccaacatggagaaaccccatctctactaaaaatacaaaattagccaggcgtggtggctcatgcatgtaatcccagctgctcgggaggctggggcagaagaatcacttgaacccaggaggcagaggttgcggtgagctgagatcgccccattacactccagcctgggcaacaggagcgaaactccacctcaaaaaaaaaagtgattgattggaagtatgccttggaaggggctggggagactgaggacaagggcggtagcctgggagctcctcgtcctggttacccactccctaccaccgccttctgggagatacgactgaacctttttacatcagtgaaatattggcaggcattctctgtgaatttcccatagcaactaattcagcccacactttggttctcattagggggtccttgtttccctgccactcttggggcagcttgtctttgcttctctagggagcccacagtctgtcgtaagtcagagggagttggtgttagccatggaaaacctgaaaatcttcaattctctctcatcatctaatatttattccttgtcaggtttaggccatgccattaacacttttacttttcaagagagagattacaaattttacttctacagagagatgagtttgagaggtcaggtagatcccagtaaaatttatcctcatcagggaaaaaaataggaatagaactttaaaatgaaaaatactagaattttaaaaacatttaaatgaacttaaaatagtcctttttaacatgtaacaagatgtctttctgtatcacctctcactgccaaggataaaagtgtgagtcagcctgggagtttgctcaggtgttcctcactgatcctggaaacctattcagctgcatcagacatggaatcttgtgcccagtggctgagtaaatagagatgaattgagcaaatgccaatttcaaattggaatcagatggcaagaactgcttgttcttttagctttaaaaatgtgtacctttttggccgggcacggtggctcacgcctgtaatcccagcactttgggaggccgaggcgggcagatcacaaggtcaggagatcgagaccatcctggctaacacagtgaaatcctgtctctactaaaaataaaaataaaaataaaattagccggttgtggtggtgggcacctgtagtcccggctactcgggaggctgaggcaggagaatggcgtgaacccgggaggtggagctcacagtgagccgagataatgcctctgcactctggcctgggtgacagagcgagactctgtctcaaaaaaaaaaaaacaaccaaaataagtgtaccttttttaatagcaagaccgtaggtccaaaggatgatataaaatttaactggaaatgccacatggggtggctcgtgcatgtcgtcccagctacttaggaggccaaggcaggaggatcacctgaggccaggagtttgagaccagcctgggcaacatagcaagaccccctacctgtacaaaaaagttaaaagttagacaaacatggtggcgtgtgcctctggtcccagctactcgagaggctgaggcaggagaatcacttgagcctgggaggtcaaagctacagtgagctatgattgcaccactgcactctagcctgggcaacacagggagacctcgtccttaaaaaaaaaaaagaaagaaaaaaattaactggaagttagttgttggttgcagtaatctatcagtggtgctctaaaaccatgagttttcttccctcattgtctatttcctaaatcatctatccattcttcaactccttacatgtggttgttgaaccctgactgtgtgcaaaactggtgcttcaaattgttttttggggcactaaatattttaaatctgtgttttaaggttctgcaaactgcttttagggctcctatgtctattttccttaagaagaatgtactagtaatttcttggctgtagtggatgaatgcagccttaggatgaatgaaagccacagagcgggaaatgttttcaggattttaagaatatggaggaaaatgctcccctttcctgaagaatatttttaaaagctagctgatataaaacgtggcagtgcttagctattaccagataagaatgatttctaacaatttcccattttttcccccttcctttaaatgtgggctcccagaactgtggcgataacacagcaggtgaccattgtgatgtgtgtacttctggctactacgggaaggtgactggctcagcaagtgactgtgctctgtgtgcctgtcctcacagccctcctgccaggtgagtccccacaggggcagctggcatgctgggctgcccagggctgcttccagttcagcctcattttcaagggtctctgagtggtctgttgttaatgaatattctccattggttgcaaaaggctaattttaagaaaaggtgttcattctcaaaagcattggaagagaatcttttcaaaagcaaagtatctgttttggtattggatgtttggatggaagcaattaaagaaaggacttttaggttttgttttttaagactcattttagcccacagcatatgtatccaatctgcatggagataaattgctattaattttattgataatgatacaaaagaacccaattaccatttaagggaatggggttagagtttatataagggaatggggttagagtttatataagctggtgcctaagtgctgaaataccacatggtgataaaattgggactagtttctaccttgtacttatgatgcttgtacagaattacctgaatgcaaaagggaaccagaaattttaagtgggaattagaatatcaaagaatcctctttggatcaaatgaaaattataactcatcaataatattttattattgcttagaatatttggcaaggtattgaacatacaaagatcaaatgttaactcttggtatactgcaatgaagtattccttttaatatttgtctgaatcttctgttttttattgcctccaagtaaatgatgcctgatggtgagtaccaaatgagaggcactatgtacacttcccttgcaagctatgaagcatcctaaaatttgttgttactagtgcttattttttatattaaatgtatatatataaattttgacttgtcaattccacttctgtagtctgtgctatagaaatacttgcatgtgtgtgtaaagatggatgtgtttttgcattgctttttactcatgaggaatagggggaaaacggaaatatctacttacggggaattgattatatacattgtgttacattcctagagtgaaatattttacaaacacggagaaaagaataaggtatatctgtaggcacagaattggagaaatggccaattgaagtatgtaattgaatatggagtgtgatgccattttggaaaaaattcatatccacgtctattcatacccatattataggtggctatatatgtgcccagagaagtattgggaaggacattctaccctactactttgcacgtttctgtgctgtttgaatattttacttctgcaatcataaaaaggttataaacatccccaaagtccgcattaataaattaaagtttgtgctatcaggaagagattgtcaggttgtgaacattcttgtgtgctctgaatctcagatgccctaaaacacacgctttattttctacatattttgtttccactgaagtctatccctttactattttaaggaggaaaaagagtcggaagtggtatggggctgataactgacgctggaaacttcatcttgctaacgaaaaggaaccagacttggctctaactggttttgttttttattgttgtctccagtagtttgcatgcacccagctcagcctctagatggcacattggtaatttaaaacgtgaaggcagagggtagaggatgttgagaaaaaggagtaaaacaaaagcagaaatccatgaatgaggagatcaaatcccagtcgatgattaaactttgagaggctctgtcattttgcttatggcagcctaccacataactccctgcctgcctttaggtgcatccgttctccagttctgccttatttccttgcctttgcctccctggctttccttcctcgcctttcgttacagtcaataaagttcttttcgtcagcgtgtgttcagccatcttccctctgctgtttttcatgcttgctcatagttgtttcagctctcttaccaccttatcacttagtaagcaaagaccctttttccttgggacactctcttgttgggtggccaattagtgataatccctaaggtcagtcttcttccacttaacattcacatgattgtccctggacagggtcttatgaatgtcttttggatacaagatgtgtgtgcacttactgattacttttattttccttctttttgccaggtagattgtaagctctaaaaagctatgtgtaatcacataactttgagaccagtatggtgtatcctaagagtaatgaataagtaccttaaggaaagatggaaattgtatatctgaaaattcaaaaagaaattcttttcctccagttttagtcccacttgtgtcttggaaggggaccacgatttccgttgtgacgcctgtctcctgggctatgaaggaaaacactgtgaaaggtacatgggtggattgtcatgtggaaatccctgggcactctgtttcttttataaggtattgggcatatttactatagtaatctgggagccattatcaattatcagtttggatgtgcttgattgaaataagacctcattactgttccagaacaagttttcccaaggtgaatggatctgtgctttgcatttcatttggcggaaatgattactgtcgcaagttagaagctggtattgaccatcctgtctgcacctatgtcccttcctttctgtaggtgctcctcaagctattatgggaaccctcaaacaccaggtggcagttgccagaagtgtgactgcaacccgcacggctctgtccacggtgactgtgaccgcacatctgggcagtgcgtttgcaggctgggggcctcggggctccggtgcgatgagtgtgaaccgaggcacattctgatggaaacagattgtgtttgtgagtatttctcctctaaatgtgtaaagatggtttttcctcccaaatgtgtcgggaaagaagtggtgacggcacgctaaagtgtctgcagaataaaaacatcctattttattttcattttcttattttctaagcatagatcactgttgcatctgctgaactgaacctttcatcatgtgttttccagctgaggcaggaggttctaagatagcagtttattcctctggcactcagagcagcacagtgatttcaactttctcctttagtggcattaatatttcctttagtggagccaggagtgatttagtgcaggagaggaaacagctttgtggggttgtcatttgtgttaccccaatttcatgatagcttccactcgtgactatcatggacttaaaaaaaaaacaaaaacaaaaaaatggagtcttgctctgtcccccaggctggagtgcagtagcacaatctcggcttattgcaacctccgcctcctggactcaagtgattcctctgcctcagcctcccgagtagctgggatcacaggtgtccaccaccttgcctggctaatttttgtatttttagtagagacagggtttcaccatgttggccaggctggtcttgaactcctgacctcaggcaatccgcctgccttggcctcccaaaattctgggattacaggcatgaaccaccatgcccggcctgtcgtgggcttttgtaaactttttttccagttctgatttattctaccagcaagtgcatgagatagtcagcttgggatgtcttctcaggggttaatggggaagatagggaggcctgttaggaccatggcattggaggtcttttttgctttgacttttgtgtgggttataagcacaaacacccccactattctctccagtgtccttcacttgtacttgtgaaagatgcatttgcaaactgcctgaggaggtgacagagcaggctgtggaagggaatgctgggattcagtgcagtgggtcctagttaaagatgagccaggcagcataaagatgggggcagaagaatgaaatgtgtgccataactccctgcctgtctttaggtgcatccgttctccagttctgccttacttccttgcctttgcttccctggcttgccttcctcgcctttcattacagtcaataaagttcttttcgtcagcgtgtgttcacccctcttccccctgctgtttttcatgcttgctcatagttgtttcaactctcttaccaccttatcacttagtaagcaaagacccttttgcttactgggcgccactcttggcctcagctgtttctttctgtgtgacctctgggaagttacttatctgatctgagtcttggcgtcatcattgaataggggcctagcacttcctgccgtgccacccatggcacagttggagtgagaatgagatcagatgtggtgcacggggtcttggagtgtactctgaccgcatgtgtcattttcacaaaacaacttgcgcaactccatgaaaaaatgggcagaccacatcgcattaactttaactctcctttttaaaaatttgtcttgtagcctgtgatgatgagtgtgtaggtgtgctgctgaatgacttggatgagattggtgatgccgttctttctctgaacctcactggcattatccctgtcccatatggaattttgtcaaacctggaaaatacaactaaatatctccaggtaggtactggaaatacagagatgaacagacacttgtatcattaagggatatagtcattgggaatggtgggagtcattccatgtgtcctccccacattgtgagagcccaacttccatcagcccctgcgggcaggtgtccagtctttccttgactgtgaccagtgacaggcacttacttacttatctcacacgctagcttgtttcacggtgggacagctctcatcatttcagtgctctctggaggactcctcatcaatgctgccctctgtggccctcattctgccttttgggataaggccaagtccacttgctcttctgtaagacaactttgggtatttgcaaacagctgccctattagaaaagcagaaaataggccaggcacggtggctcacacctgtaatcccagcatcccagcactttggggggccaaggcgggtggatcacgaggtcaagagatcgagaccatcctggccaacgtggtgaaaccccatctctaccaaaaatacaaaaattagctggatgtggtggcgcgtgcctgtagtcccagctacctgggaggctgaggcaggagaattgcttgaacctgggaggtggaggttgcagtgagccgagatcacaccactgcactccagcctggcgacagagcaagactccatctcagaaaaagaaaaagaaaaagaaaaagagaagaaaagcagaaaataaatctgaacagtatcttctttaaggtatattatttttaaagtgtattattcttcactgcactaaagttgcagggcacaaaatctctcctccctggaaggctacattaaatgtctggcagtaaatcatagttttatgttttcatcaacagagcctgggtcaaaaaagggtgaggagttaagaaattaacttagtagacagcatcctactatagcacttatttatttttattatcttatttatttattttattatttttttgagacagggtctccctcagtcacccaggttggcatgcagtggcgcagtcatggcccactgcagccttaacctccatagctcaagggatcctcctgccttagcctcccaagtagctgagactacaggcacacaccaccatgcctggctagttcttttatttttatttttaatagagatgagctctcactatgttgtgcaggctggtcttgaactcctaagctcaagagaacctcccaccttgacctctcaaatttctgggattataggcatgagctaccacgcccgacctacttttaattctaattggaaaacagtgtgattcttaaattttgctttatatatgcgttagaatttgacataatctatgcagtgcaccaggtagcaataaaagggatggccattcctaaatgccttttcttagataagagttttcctcaaacttaggacttccttaggtgtgtgcgtgtgtttatgtgtgcgctgggatggggctggttcttgaatccgtcttgatttgcagtggtcttttctctataatggtagttcagaaaggttagggacctctaagagatgtttttatgttatactttcctcaaacgtcacaaagtgtttttgaaaaatgagagcttttacctctataaaaaaaagaatatttaacttttttttccaatcactatatacacgatcagtataatatctgccagtcttggtcccagggatataactattttatatatatcaaataagacaaatatttgatttaaattttaactcattttgaatgatttgctctaaataaaccacttgtccgttttctttaaataactttttgtgtttatgtaaagtattcatcaagttttaaggttgaaataaaattatacaagaaattagaaggctgttggcataaattaagcactttatttttctttatttttagtatttataaagtctttctttattgaattcttttgtagtttagcctaaaaggcatttttttcttaggtgttgcaattatagttaaatttgtgtgactctgctattgagataaagccagacttttatctgagaattgcagcagtatcagattctgctgaacacaacagattttaaatttatatctatatcagaaatataatgcaaaggatggcagtgtagaatcatgtcgctataatcgaaacctaagtaaatgtgatccatttttttttaaaatgacagttccaaggaaagaagaatttctttctgtgaacaaaaaagaaatgcaagtgcttcttagttaagaatcagaacattttacttcgaagcattgtaatttgtttcctccattcttcctaggaatctttattaaaagaaaatatgcaaaaggacctgggaaaaattaagcttgaaggtgttgcagaagaaacggacaacctgcaaaagaaggtaaattctttccataaccaaccaaccttcctcctggtccctcccatcagccctcctgagcagttgccttggggctgtctggaaggttctgattagatcatgccagcctcttcctcccacgagctgtgctccaggtacttaatcatcaaattggttttgaccctgccagtttctgtggtttagtgggaaaaggctcccgacttaatgtctgttgtcatctctgctgaggacagagttgggcagtctcttggctctgactttcattttctcctctgaaacaaaggtggggcggggatgaaaagattgctgaggtttcttccttctcctaaattcattcagtaacgaagtacacggtgagcccaaaagcacggactgaacatcagtaatgctctctgcagcttgctgggtggagcagggagggcacagacctcatgatgaggcatctgtgcaaacttcaggcttcaggctggggtggttctgattttagggccctgaatggcaagtgagcttgtttttctgtcatcagggaattatttattctgtttagcctgtgccagaggaatggcatttagtgacctaaaaaagaatctccccttctgcagatggtgaggaaggattattgtcaaatttactgttttttcatttatgaattttgtatgtgtgtgtgtgtgtgtgtgtgtgtgtctgtactgtgatggtgtatctatacatatggatgtctaatctccatcaacacatgcacacatacacaaacatcaccctaggaagtatagtttggctcctgttaatttagaattaacgatgttttggaaagagttgaagggtttaagtttgggtttaagtacctcatcaagcaaacatttggttggaaataggctgattaaaataaattctctgtatccgttattctctttggtcttgactagaaaacaccaaactcagactgggttactctacattcttggaaattacaaacaacctttcctttaacaaagagtaaaaatcccagtagaaataacagctgaggacagctaagtgtcagcctctgggctgctgacttcctggctctcgtcttgtgtagttctcgtagcagccctgggaggtaagcgttgctgtttcccaagtgttacagacaatgcttggagatgtctgggcctgtccacagcctggagaatcaggtctaaaatcagcttgcctgactccgtgttcttaactcctagagactaacatctcataggccatacaaatcagtaaggtttactttctatattctgtatatttgggttttaaagtgaatcgagggccctcacagtatagccactaggagaatctgtagtttaatacacaattagcctgcttttaaaaacatacccatcttttcttatgctgagtgagttgtaaattatttcattaactacttagtccatttctaaccccaaaatattaagctcggcttgcatgataatgctcatctttactctatattctggaatatatgttgttgcttataagcggcaacagtggaatattacaacttgcgtattatttaaagtcaaactaattacttaaagtcaaactaacctgagactttatttttccaccagctcactaggatgttagcgagtacccaaaaggtgaatagggcaactgagagaatcttcaaggagagtcaagacctggccatagccattgagaggctgcagatgagcatcacaggtagtgtgggcagtgtctagtttgaagtatctgtgcttatctagtaagaagtcaccattgctttattaaacatatgaatagatgtatatctcttgcatcgggtttccggaaccagaggggctggaatagtttggggatcctgagatgtgcaaactttagtctttgactgagagttttagctttaaaaaaatgcatatttctttttttattttctgcattatgcctaaaacttagatcctaattctcaagccctgttatggtaaagttagtatggtagctctccatccatttgcccagaataggagctgacaggatttgggacttcagttaggtaccaagtatatccatcacattagaataatttaatcacttctcagttgggtgtgctgtggcttttagcatactattttcagttttctggctaccagaaacatatgatcgctcttctttttatattatagtgtaagggcttaaaaagtacagaatccaataaaaatcagactttatagggcaaaaggtaaggaaattattagaacaaagtatacttaataaaaaaagtaggatcaagcattggtggtttatttatgcagtaaatatttattgagaacatttatttttcatgtgcagatgtctctgccaggtacaaggaaatgctgaggttgacaccatgtccttgcctttagggagtttattggtgcatgagaagactttgaaatagaccagtaatcccaagttcatgaatgtttagttaggggatgtgcagagtacactgggatatgccaggtggcctggcctgacatggaggtccaactcagcttaggtaaacagagcagtcctcagcagagaagtttctaagttcttcacttggtactagccacttttgagaggcttattaaataattgatgaattttctccatagaaattatggaaaagacaactttaaatcagactttggatgaagatttcctactacccaattctactcttcagaacatgcaacagaatggtacatctttgctagaaatcatgcagataagagacttcacacagttgcaccaaaatgccacccttgaactcaagtaagtttctaattactgtgtgcaatgcaaccaagtagagagagaaacttgcacgctatctccaaaggagaaggaggcatcgtggaagaaaagtgctcactggaaatgaaatatcctaagagaggagaaggggccctgtggtcaagtaaatgaagagatgggtactgacccctccaaatatagaaaggtgtaatctgtgcagtcagtgtaatctatctttgtgctatcatgcggtagcttctgtccttttctgtgattccgggatgtttccacttagcacaaacagcatagcctcatggtactgtagatcaaggataaggcagtaaactctcatagaaaaaaatcgttggtggccacccataccatgaactctaagacaggtcaatgttatgccagaataattgagcttagttatataaaaaagtatagttacattgaaacccacgatgtgaagtgacacagagatcacaaagcattcttacatacagtcacaaggagtttggagtttcctttccagcttttatcttagcatttccacacaggtattacttgatatactagcacaggctgtctctctgcaggttgtaatgaatgtctgaagtgctgttataaatagttacatgatactttattaaaactctactctggacgttactatctaaactataatctaatgaaatgatatagtcatgtgagatatttaaactttaatattttgctattttaaattatgttgtgagggacttcttattcaaatgttttatatctttttctatattgaaatatcaaatatttatttatactgtatatatctcttctttttctgtatttcagattattttcagggtagatattaagaagtagaattattggctgggcgtggtggctcacgcatgtaatcccagcactttgggaggctgaggcgggcagatcatctgggatcaggagttcaaaaccagcctggccaacaaggcaaaacccgtctctactaaaaatacaaaaattagctgggcatggtggtagatgcctgtaatctcagctactcgggaggctgaggcaggagaattgcttgaacctgggtagcggaggttgcagtgaactgagatcatgccactgcactccagcctgggcgacagagcaagactccgtctcaaaaaaaaaaaaaaaaaaagaagaagaagtggaattatttagtcaaagaatttgtgttttgaggattcctaacatgcacttccaaataattttttttttatattttttaaaaacaatgttcactgccaccagcaacacactagagggttgggtatgtgtcttttttcatcatagagcataatttttgacgttgttgatttgttaggtgaaaaacaaaaggaggtgcttacagttggatggagtttggagagaggactagtaatctaattactagaataatagggcctggaaagggctctgagagaactaggatctaaaggccttgcgcagggggaatgagaggaggacgtggtcctgggagatgggcgtgagcagctgtctgtggagcccctcctctgtgccaggagagtgctggcttctcttctcacattgtgttctgtgatcatctcagtctttccaagtaggggagaacccagttgaggaaactgaggcccagggaatataagtaacttgccctatgttaagcccccgggacaatatgaaacctgaccacaaacctgaatctgtttgagtctaaaccctattattttcccacccagaacaaaaggaagtaccatttgagacccattccataaaagatgggcaggtggaatttggacagtcggagacatcgagggcctttcaggggcggggaaacgagatctaagtctagcataggtggagagccattgaacaagggaacactggagccaaagaagctcagctgaagtttgcatcgaatttgagaggcaatgggtagtggtgacagaagccaaggtgcgaacgttagtcctgcagccccgactgcacactgaggcttcagctgtgctcttctcgggcagctccaaccagggcttcccaggacctgcccaccctggaggcgatgcccctgggtggggctctgctccctaaccttcctcagccccccacacatctgagttggtggggagcatgtgaaggatggagattcccaggcccaccctgcagatcctagagaatcattttgtggggctctcccctcccaccgttacccttctgaggtcagttcattcattcattcattcagcaaagtgacctgaaccctggttacaagcattgtgccaggagttgggaacatacaggggaacaatagagccttttgcccactaggagctcctggtcaatttagggaaagtttattttctgaatatgcactttaaatacaataagaaagtttaaaatagaggtcaaattttcatctataggatgatgttagtatctaaaccacaatcacatgaaatgatatagtccttaatgacttgaacatgattaaccaccaaaaacaaaacaaaacaaaaaacccagcactcttcattagcttcttctagcaaaattgacagaggaaactggtgtttctcaagctatgtgcctctataacactagtgtcccatgaactcctgggcagattccttgaacaaatattaaccttcctaggatctgcaaggcaggcctgggactctccatccttaacaagctccccagcaactcagatgtgtggggggctgaggaaggttagggagtggagcccagccctggggcactgcctccagagtgcgtggttcctgggaagacctggttggagagacctgaaaggaggtgggtaggcagggccagcccccacccccacctgttcccctcagtgcctcctgaccctcccctattggcgagggcctctaggatccctttaatttgtaagttaaaatactactaaagagaccttttattttaaaaatcaagagtttaaaatgtattctctggcctccactttctgattttccatagataatccctatatatatgccatttcaaaatacatggattattttaggaattatctgctttttaattataattcttaaaacattggtggttcatgctgaagcatggcaattgtatagatgagaagtttagcacacagactgattacttttcatgctgggtcgggggtctccagaactaacaccacattcagagtttcaccaggacccccaggattcagcatataactgtacttacagctaagatttattaaggaagtccagccagatggaacaaaaggacacagcagagtctggagaaatccctgaagtcctctccccatgtgggatcccagagagcactcctcccccagcaagaaaaatgcagcaacatgtgtgtgatgtttctgcccagggaagcctgtcagagatgcagtatccagggattttgttggagctgtactggtaggcaccctctgcctagcacatagcaaaagtcgactcccagaaggaaagcaggtgttcagcataaaccatgttgcttgcacaaacagcccaggtagtgagctactcttagcagttagggatcagtgggaacgcagcccacctcgccagcaggcctttcagaggagagcagactccatccagcccgccacgttgactctttactgtacacttcggattattgtttgtagctgtttttcaaatgatttccatgctggtatctcagacctattaaaagattttttttttttttttttttttattgagacggagtctcctctgtctcccaggttggggttcagtggtgcgatcttagctcactgcagcttccgcctcccgggttcaagcgattctccctcctcagcctcctgagtagctgggattacgggcacctaccatcatgcccggctaatttttgtaattttgtatttttgtagagacagggtttcaccatgttggccaggctggtcttggactcctgacctcaggtgatctgcccgccttggcctcccaaagtgcggggattacaggcatgagccactgcgcccgaccaaagatatgtcattaaagaagcacattccaagacacagtgtctactaaggagagccaagttctgtactgcaggtcttctcaaagcttttagtacgctgacgcacatcagcagccccgtggaggatccggctcacttctttcaccctggaatatttgttcaaggaatctgcctggcagttcatgggacattggtgttgtagaggaacatagtttgagaaacaccagtttcctctgttaattttgctagaagaagctaatgaagtgctgagtggggtttttttgttgattaatcttgttcaagtcattgaggactatgtcatttcacctgattgtagtttagatagaagagtcatcttgtagatgaaaatttggcctctgttttgagctttcttttttctctttttgagacacggtctcactctgtcacccaggctggagtgcagtggcgcaatctcagctcactgcaacctccacctcccaggctcaagcgattttcccacctcagcctcctgggtagctgggactacaggcacgcaccaccatgcctggctaatttattttaaattttcttagagagatatcttatttaataataaggaataatagattcatgatcacacattagaaatatattgggtttatttgtgttttcttacgtatgtgttttagttcttgttgcctgctcataatgcaacgtctttattatcgttaaaaattatatcattaaaaattataagtgccgatgttattctaataatgtcagagttcaaatttataaccttgaaaaatgtttttggtcgtgtcttaacccagtgacctgacacctgtgaaagctgagggtgttttacagggcattttccatagaatttttcaaaattgtcctgacaaattaaaatgaagagttaataggatatactccaccactgcaaggatttgtagcatgaaattttattattctatgcagctataaattcaaaattgatttaaatcagcaatttgatggcatatttataaagacataggaaaaaaatcttttggtattctaaagcttgcatttatccatggtacaaatcatatctttttgtcaatttgaatttgaaagcttttatgaaatctgtttcttcttaactagctgcagaaaatccttttatcgtatatataaattggtaaattcttaacaaatcactgaatagctttctttcaatttcttgctgtattatatataatgaaagattgcagttcccatcaacacagaatgttgtcccaatttcctgaatccagattcatggagatgatcttttttaattccattactaaaatgtattagaaagtttaagtgttcggattcccacaaagcccactggacccaagtttaccaggaaatttggggaggtgggatttaatgagcttcatcatttataaaatcatcagagctgctgataaaagaagtaaagctttgggccgggcgcagtggcttacgcctgtaatcccagcactttgagaggccgaggtgggcaagtcacctgaggtcaggagtttgagactagcctggccaacaggtgaaacccaaaccccgtctctactaaaaaaaattagctgggcgtgatggcaggcaccttaatcccagctacttgggaggcagaggcaggagaatcgtttgaacatgggaggtggaggttgcagtgagctgagatcaagccattgcactcaaacctaggggacaagagcaagtcttctctcaaaaaataagaagtaaagctttgaaagcttcaagacttgtgcctgcttgtggtcatcctaaccggcttaacttgaaatacacatgagatgaaagatcaccgtgcctgtaaatttcagcaaactatatgggaacatggaacatcactgtgcacttatataagtaccatttacttcctgtcatgaataaatgtatctgtgagatgcaccactaaaaaaaaaaaaagacaatttgttaaggataaaatataaacctgccatacctgtagctatcttagaaaaattgtttccattcttaagaagttatgatgtatcacttacaatttcaaaaagagactaggcataaatacgtaaaaattttttccactattatttcagagataggagctttgttgttcatttacttactatgtgaaccattcatatttatcagggctgctgaagatttattgtcacaaattcaggaaaattaccagaagccgctggaagaattggaggtattgaaagaagcagcaagccacgtcctttcaaagcacaacaatgaactaaaggcggctgaggcgctcgtgagggaagctgaggcaaagatgcaggaaagcaaccacctgctgctcatggtcaatgctaatctgagagaattcagtgtgagtctcacttgctctctccttctcaattagaacaggtaacaaaatactccaacgtaagcaattaaaagtgagccctggcctggctgggtggctcacgcttgtaatcccagcactttgggaggccgaggcaggcagatcatgaggtcaagagatcgagaccatcctggccaacatggtgaaaccccggtctctactaaaaatacaaaaattagctgggcgtggtggcatgcgcctgtagtcccagctactcgggaggctgaggcagcagaatcgcttgaacttgggagatggaggttgtagtgagccgagatcatgccaccgcactccagcctggcaacagaatgagactccatctcaaaaaatgaaaataactttaaaataaaataaaagtgagtcccatgcactaacttctgcacgtagcattaggcaccaaaggtcagaagcagggttgcttttatgaagcacccttaaaatgccgtttctgctgcaggataaaaagctgcatgttcaagaagaacaaaatctgacctcagagctcattgtccaaggaagaggattgatagatgctgctgctgcacaaacagatgctgtacaagatgctctagaggtaaattacatctcagcacagccacagtacagtttttaaagaatcttcacacatcttttctatatgcacacatatctgttattaagtagatgtgcatatatttacaatattaatttctccatgtagcacttagaggatcaccaggataagctacttttatggtctgccaaaatcaggcaccacatagatgacctggtcatgcacatgtcccaaaggaacgcagtcgacctggtctacagagctgaggaccatgccgctgagttccagagactagcagatgttctgtacaggtaggaacacgcctttgtgggaactcaagagcttgcagtctattgatcggagaaatagatggatgtttctattcacagtgatgggtcactcttcctttgtgtaaaaatgagcactcctgttttatttacctggcaagttggatttccttgtgtctgctaacatagtttaccattggcctacatatatggtggaaaaatgcaaataacaggagaagacttaaaacacataatatgctacagtataatattaatataataaaacacatattatgctacagtatcaagccatcaaggctttattaagcacctactgaatgctcagggctttgttaggttgcaggtggaacagaatgaggttattaatttctttacagatcttgcctctttggagtttattatttggttggaggatgtggctgcccactctctacctatagaagtgttgggagtctcttttccaatccctgagagataccacctccaattattttctactgcctgaaagtctgccattgtaatacaattactttaacttatattttttggatatttaaaaaatatgtactcaacttgctaaaaattcctttaaacgagaagcacaattttagccatccgtttcaaacttgtctgcacattggaatcacctggggagcttcttaagccaccgatgcctttgtcctttagctgccttccccccaaagattgtgacttaatgggtctggggtgtaggattttgtgattttttaaaaaccctcaggtgattctaatgtgctgcaaatgtgggaaccaaagttttaggtgttatcagtgatttacataatactgtgagttaattggtaaatttctttctttaaaatttgctatgcgttatgggtgacaagtctgaccacactgggaaaatgtatgttcttgtgcatgttctgtggaaggggaaagatgcgtgtctccttattggaaaaatgctgacataaaagattagttcacacaacaaaagcaattaaaaatcgtataagatagaatattgcataaattatgcgctaaattgagtactgcttcctaatatgtcttagggatcagtagtggaaaatggcattagataccagctcctctcttctcatcagttttcatcatttcccccaaagagaaaaaaatattctgactccatacctagctaaaacaaaatctttattacttcgtatgagtaatagaaacaatttgttgtgatttaacacaaagttaaataattatcttttatttataaatcacagaattttgccagtccaatagtaacaaacaatagctgctaatattcggtctgggaattgcccgactcaataaccttggaaagaaaatgaagtgagttactcagcaggcaaagatgtgcccattgccagactttattttcaagacagagagcactggatgacattgtgccattaccagttaccaagttcctaagcaatgtgcccacttgttagaatgatgttaagctgattgaaatattagctgatcttcctccaaaatctctagtgaattttgtaaaattgtcgtatgccattagagggataagattcagcggcctcaggtatgcttagaaacacttcttggaggttaccaagtatgttgcaggaagtttataaccaatgcaagcatgcagtggcgccctagacacgcgcaggggattggaacagagattgaggaatgctgagggcagctggtggaaagtgatgaatggtcgtctaagggaaacagcaatagtctcttcttgggtattgattgaatagcagttctgagtgttatgacaaagtggctacggcttctcaaagattacttttgaagttacatgggaacccataggttgttattttttatggatgatactcttctaaggggaaagaagataggaggctttcaaaactggtaggcatttatgatttttgtgagtgaattggcaagtttgatttagtttatcataacgtatctaaatatgctgctttgatagtggccttgaaaacatcagaaatgtgtccctgaatgccaccagtgcagcctatgtccattacaacatccagagcctgattgaagaatcggaggaactggccagagatgctcacaggactgtgactgagacgagcctggtaggaaacgacgtggcttctttttctgggctctgtgggagatttttctgtaccgggtttgagcagagattcagtggccccaatttctgcctattaacattcttttctggtggaatctgtttctggcttctgtcatcatatgatctgtgttttaattttttaaggtcataaatacttctttatacagactagaaaccagtgtggagatgagaacaatctcacatttccttgcgctaaaaatgatgatgctacttgatacctactggagacatttttctataaccatggtgaaaatctttattgaatggctggtttccttccttatctacttaaaaatgtctttgttttctcttgcctcagccattttaaattgtccctacctggtacctggctgactttcttgctgggaatgtgtctgggggctactctgatggagtcacttcctctgtccccagcaggactccaccctgccctgctctcaccacgcttaagtggttctgttttccagctctcagaatcccttgtttctaacgggaaagcggccgtgcagcgcagctccagatttctaaaagaaggcaacaacctcagcaggaagcttccaggtcagtatgtggctcggacggtgtagacaggcagagtgagcgtgagcgtctcgctgagcagcctctaagaatgttctccttgcatgcagcaacttgaagcttagcatttctgtgtcccatttatattccaatttcctatcatataaattttcctatcgtataaacttcctatcatataaacttcatataatttggcatttttattctagtgatatctgttcctttattgtgcagtcatctctatctttaacctgtccataatcctccactcattgccttagcttggagccttcactgttcttcctagtgtctgttgggttatctttgattgcgtgtgctcctctagtttttccttgaggagatgtattatgcttgatatttcttttacctttctcatggaactaatatcatattagactcatggtaggttctcatttaataatcattaaattaaatcctaattgatttagccatttttcaaaaaatacctatgcagtttagtttgtcctaaagtttcaagaaagaatgacttggcatatgtaagagcaatccatccaataaacatgaaccaaagtggcagcaggaatctgttatgtaagagaaactacgtaggcctacaattttttataacaaataatgtgctttccaccttaatatattctaatagatcaaaaataccaagatttctggaggagtaaatagtgggccaggcacacagctcataccctttacaggtgacttacttccgagtctaacactggatccttccacagctgtctgaactaaaggcttggatatgtacataatttttttttctcattgagtgacacagtttaaaatttatgttgtcatctcacagtatcgaaaatgtataatgtgttgatgggctgtaatttcagtctgtacaactagaggtacttcataggtagtgaaattgggagcttgctggcaattaaaatttcacgttttaaccatgtgctcaaaatccaaatgtgattgtatgttatgaacagaaattttaaaagtaaaagctgtgatcaaacttgagaaggaggttgagttgagttccagttgggtggccagaagggaatagtaggggatggaggattggccagagatgcaggtgggagactgtgaggaagactcccaggtaggagcccaccctaggggttttacaacccagaggagaaaggtggccaggattcagatgggaatagaaagttagtgtgtctgattaagactgagtgacttaaacacagctcttcatccttgagctctagtaaaattggacatgaaatttaagtagaaatattagtgaaaaagtcaacaagcaaagtagagaaaatgatcgagcaagctagaaacacattcttaatttctttttttttttttttgagacggagtctcgctccgtcgcccaggctggagtgcagtggcacgatctcagctcactgcaagttccacctcccgggttcacgccattctcctgcctcagcctcccaagtagctgggactacaggcgcccaccaccacgtctggctaatgtttatttttatttttatttttagtagagacggggtttcactgtgttagccaggctggtctcaatctcctgaccttgtgatctgcctgcctcggcctcccaaagtgctgggattacaggcgtgagccatcgcgcctggcccatactcttaatttctataatgagtggtgctcagtcttgctggaaaaactgtcaatattgggaatctctttagaaagctatgaattctgtcgatggtcaagaatgataaagctgttgcctaggcaacttttttgtaggctaacctgaaaggaaacatttttctccctttaaataggtattgcattggaactgagtgaattgagaaataagacaaacagatttcaagagaatgctgttgaaattaccaggcaaaccaatgaatcactcttgatacttagagcaattcctaaaggtaagtggaaaggactttcttctgtaaataacgtcttctcattgtaaaagcatcactcaggaacataaggaagtcctgcctcaagactgataaaggctttagctcaaaaatgagactaagattggcaaaatttttacttgcaaaggaatatgatttagaaatgaaaatcattggtttttaaaataacatcacaatacttgcatcaagctactagaattatagtcttaaaaacagagactgcatagtatctgaattgcttacttttgaaatgggattgacacattgcttagaggaagaaggaccattgaaagaagtcagcaagtaaagaagctggaatgtgctttacctgcctaaggggaaaatgccagattcattatcagtgtggcgaactgaagactgctcgcttggccatcttcctcagtgaggcagtaaaacattaggctcactgatcactttaatactgatggtttagaaatgtggtattcatgaaattttttgggggggtctacagtaattttattgtaacagagaagccaggccgcaataagtctacatgattagagcagatggtggttctttccagtgggtgaagcctgaacccggctagcagcacacattttttgagacagagtctcgctctgtcgcccaggctggagtgcagtggcgcgatcttggctcactgcaagctccgccccccgggttcacaccattctcctgcctcagcctcccgagtagctgggactacaggcgcccgccaccgtccccggctaattttttgtatttttagtagagatggggtttcaccgtgttagccaggatggtctcgatctcctgacctcgtgatccgcccgccttggcctcccaaagtgttgggattacaggcgtgagccaccgcgcctggcctaaagttttaaataggataatttttttatgtgtaatacaaatgaatcgtgctgcacctcaaacttctcttttgttcttttgttgttttttactttgaaaatttcaattgttttatagagaccgtgtcttgctatgttgcccagattggccttgaactcttggcctcaagcgaccctcttgccttggtctcccaaagttctgggattacaagtgtgagccactgtgcctgtcctcctttttttcttaataagcatcttttgaaaaagtcttataaagtgctttaaagccattaaaaacaggaagccccaaagtcctgtttgtaagcatggaagttacctggggaaactgggcatgctgcattgggcttacttcttactttgaaacaatggagcattttctgatccggaagattttttttttccttttctttttttataaggatgccatggtatattttgactaaatgcttaataacgtttttatttgaaaataatttcgagcctacagaaaagtttcaggaaaagtaaaaaggccacctgtataccctttttccagctttttctgctgtaaatgttttgccccacttgtgattaaatgcttcgaaaatgaatgatagtgtcttttaaaaatcctcacccagattttctagaataactgaattccaatttaccttgagtggctgtttgggctttattctgctgttacttctagcagccagttgatgctatgggcaaatacctcttcctttaacttaagacattcccaccttagctgcagacctaggatccaaatccttattatccagacatgaaaggaggtggaggacatgtttcatgaagctgagaaaggagtgatggaaaaggacccaaataaagaagttcagcttattaagatgtaagacacagctcacacagcgattggccattacttttgtgatctcattgtttattgaaatcatattccagagaagtattaacaaaaattatttcatttgtccctaaaaggggatagtagagcatatgatatgcagctttaatattgccattagaaacaagaagctcttagttcattgaccactgcccaaaagaaaaaaaagcaaacagacaagcctcagtttgtgttcagcatcagtaatatgacaataatatatttctgtgcgaaattacatttgttgtcgttttattcttttctctgtgtgtaagcaccagaagtgcatgcttttatatacatttattttaggtataagagacaagggagccaaaaccaaagagctggccacgtctgcaagccagagcgcggtgagcacgctgagggacgtggcggggctgagccaggagctgctgaacacatctgccagcctgtccagggtcaacaccacattacgagagacacaccagcttctgcaggactccaccatggccagtatgtcagcgcccttccttccagtcatgatcgtctgcgtcatgcagacgtggagctagctaagcacacagtggtgcgtttttcacaacattcctgaaaagtagaagtatgctaacatctggattagcctttattaagagaaggaccttgggaaatgcatgctacttgtgcagttttcatctttgtaccacaatgtcatggctttgattgttagggtgttgttttaccaagtgcattgttaatggacaattaattatcttgtttttccctctccccaactttcttgccaccccttgccttcttgtatttgttagctctgttggctggaagaaaagtcaaagacgtggaaattcaagccaaccttttgtttgatcggttgaagcctttgaagatgttagaggagaatctgagcagaaacctatcagaaattaaactgttgatcagccaggcccgcaaacaagcagcttctgtgagtttggggccccgtggctttcgtaactgggctctcagtcatgtggggtcccagggaattcatgcagacatggccctcagtcacactgcgccccttagggcttccaaagacccagatcccaataatctgggcttcctcatagccctgtcttggtatatttaaagccaataactagcttcattttctttgagttctgcttttgttcaacatgcttcaaaatgttgttagcaaagagatttccatgtctttatggagatttatcattatagactaaatttaaaactattagcctggacagtgcggaacatgtcaaatctacgtgttaacatcactcttaagtttatgggttgcatgtggtgttagttcttcgttttaccaacttagttttaataatccaagtattccttaaaatgtttgtgtagtatgggcctcatccttgaggtgtctgagaaaacagtttgtatgcaacgaaggctgcacaaatccaggtcactaaatgcctgaggcactggacacctggagcagttcacacatgagaagatgttttacccatggcacatggcactggctgtgccctaagggaaaaagtttccttttgagagaatgtgcagtcgtcatgtgattggggacttcgagaggatgaatgcagcctctgggcttgcatttgtccacctgaggctttctagggaagagaaaggagcacagggctctgtcttttccaaaacctcaagtgtccttgctattggaaaaggaatgttggtttccatgagctctggcttgcatctgtttcagttacaattgctaaataaatacaggctgggcctggtagctcacacccgtaactcccacaatttgggaggttgaggtgggaggattgcttgaggccgggagtttgagatgagcttaggaaacataataagatcctgtctctactaaaaaaaataataataataaccaggcttggtggtgtgaacctgtagtcccagctactcaggaggctgaggcaggaggattgctcaagcctaggagttcaaggctgcagtgagctatgatcacgccactgcactccagcctgggcaacagagcaagaccctaaataaataaataaataaataaataaataaataaataaatataagcccaaggaatgcttcttgatgctaggttaataccaaacttagactctttaatgtaagatacatatgcaacgaattactagtcaaagaaatatgtagtaagtgcaataattgctctataaatatctgctgagtgaataaatatattacctctccatttattcaacagatgattatcaaataccctctttctttgtgtcaggcggaaagattccaaggtgataagatccttgtctttaaggaattaaatcttatatgagcaagacagtttcctatataaaataacttattaaaaactaacactgattttctcatatttaaacacttaatgaaatcatttttgttaccatctgatatgtcacttcatgaaacatgaaccattgtatgttatcaagagaggaaacctgcctcagtgaaaattcattacagaatagcattgttgagctgctggtgagctgccggtgtgtgtcactaaatgatggggacactttcattttccttctacagattaaagtcgccgtgtctgcagacagagattgcatccgggcctaccagcctcagatttcctctaccaactacaataccttaacactaaatgttaagacacaggaacccgataatcttctcttctacctcggtagcagcaccgctgtaagttatggacctttggaaagcgacactgaatcttttatgcacttctagatttttctgaattttcacttatttgacgaaaaaaaaataggccttagtgaaatctctaaatctcccatagggactaacctttgttaaaatggtagcattagatgaaaaatgaacaaactaccaaatggaatgcctgtgagaaggaaagtggcgtttctgaaggatgccatcttaattgtaagccttggggatggaacttttttgtgattcccccgttgacccctggagtgactgagtagcagaattgtcaagcttctgtcaggtttttcttgccaaggattccagtggtctccagatggcaagtgcctatgaaaggtcttcgataccttggctgtgccagtgagaacaggtcagaagcctggggtgtgtagggcagaaaatgttaacgggcacatatagtatctgaaatgtcttcaggagatgagatgcaaagtgcatgcaagtctgtgacaggggtgggacctcatggctcctgtcttactgcatatttcacatccatttcttacctcggagactgggcaaaggagcaagctcagtgccttccctggtgctccctgtggactgcctgtgacctgcagcgaattttcctggggactctgtgggagacattgaggagggccatgccaggcacgcagggaggcgctaatgtccccggggctgtgagtcatgccccagctccagggaagggaccatttcaaacaaaagaaaatagatttggggggtttgctttttatgtatttatttttaagaaaagagaaaaccccgtaagaattgactctgtaaagtgttgtggtggtcagcaaacagtccagtgtgtaaactgatccccgttcattcctcgccccccagtctgatttccttgcagtggagatgcggcgagggagagtggccttcctgtgggacctgggctccgggtccacacgcttggagtttccagactttcccattgatgacaacagatggcacagtatccatgtagccaggtagaagagaatgttctctcaaagcagctctcttttttaaagtgtgtctcataagtaattacatgcttgtaacatcatataataggctttgaaacttctggaaagtcagattataaccaaacaatacttggtttaggttagctgtagaaataagcatttgtggccagtggctcacacctgtaatcccagcactttcggaggccaaggcaggcggatcacctgaggtcaggagttcgagaccagcctggtgaaaccccatctctactaaaaatacaaaaattagctgggcgtggtggtgggtgcctgtaatcccagctactcaagagactgaggcaggagaattgcttgaacccaggaggtggaggttgcagtgagtggaggtcgtaccactgcactccagcctgggcaacagagcgagactcccatctcaaaaaaaaaaaaaaaaaagaaaagaaataagcatttgttacaagtgacagaacttcttttttaaggctgaataatagtattccattgtgtatttgtgtataaaaccacattttctttatccattcacacattgatggttaatcattccacatcatatccaaaaatcataacaacattttgcacctcagaagtatatacaactataatttgacaatatataataaaaattaattcaaaaaatttttttaaaaacttaaggtttggatttttttcttactgcaggagaaacaaactttgataccaaaatcaacaatcagaagaagaaaaaactgaaaagcttaggttacctttagaatgtctaaaatgtctaaaagtttaggttacctttggagaccaggcatggtggctcactcctgtaatcccagtgctttgggaggccgaggtgggaggattgtttgagcaagaaggagtttgaggttagcctgggcaacatagtgagactctgtctctaaaaaaaagttaaaaatttatccaagcacagtggtgtgtgcctgtagtcctagccactcgggaggttcaggcagggaatcactggagcacaggaggtcaaggctgcagtgagcaatgatcacaccactgcgttccagtctgggcgacagagcaagaccctgcctctaataaagttaaaaagtaaagaatgttacttttagaaagtctacgtgtaaggcagccaacctggtaaaattcctcaggagagaggtgtaaggtgtggcatggtagacattgcatgtggctggcagcacattgcacttaagtcaaggacagaaaataaggatgcaagtggggggtgcattttcttaaaattcaggcacaaagcaaaattcttctttttaaaatccttcagaggtaatcacttttgagcagctttaagtgtatgttttcacttttctataatattatggtttgttgggatttttttaatttacaaaatgggataatatttacggagtagacatatcttcagatacagtttagctcatctcagatgttttaagcagggacacaacatgatgaaatttctgtttcggaagagacactcttgaagatttcgggcagtaggcaagactggaagccaggaggccagcaggggggtgctgttgcagggcccttggggagaagcagatggtgggtgtgaaggaaacgggattgtatgtgcgctgactggaaattctgaaaatttcttttgcaattctttgtaacccttagatttggaaacattggttcactgagtgtaaaggaaatgagctcaaatcaaaagtcaccaacaaaaacaagtaaatcccctgggacagctaatgttctggatgtaaacaattcaacactcatgtttgttggaggtcttggaggacaaatcaaggtaacattacgaaagttcttctgaacaggactgattgactgattttacctatatataaaagtcatgggccgggcgtggtggctcacgcctgtaatcccagaactttgggaggccaaggtgggcagatcacctgaggtccggagttcaagaccagcctgaccaacatggagaaactcttgtctctactaaaaatacaaaattagccgggtgtggtggcacatgcctgtaatcccagctactcagggggctgaggcaggagaatcacttgaaccctgggaggtggaggttgcagtgagctgagatcgcgccattgcactccagcctgggcaacaggagcaaaactccatctcaaaaaaataaaaaaataaaagcatatgtttagatggttgaatatatcctaagcagatgaagatgtttctgcttttgttttgctttctgacagttcctctgcagagttaggctggttttgtacagtaaagggtgatgcttcatcagtagcataaatggagaaaaagccaatggctcatcttgctgtttgggtttctttcccagtgatgaacaggaaattcagtgctccacgttaatttctgtaaagtttctttatctctagtctagctctagttagtggtcaattaatactaatcagtgtttagcaaaaaagcccaccatatttattttattatatcagttctcctctcaccaaatataattgtgttttttggatctggttcaatgctctgaagtgggagtctaggtctcaggtccagctgggccctcactaccaatcacattctctggctctctgttttctcactcgtacaacacgattctctccatcaaccctagtcactgagatgatctttaagatcctgcccagttgttactcattctaggattccacttcataactgaaaggaaatccagtgattacaaactggcttttttctaatgtggctctctcaaaatttggatctgttagattgaagctcccagagagaagttttgtgcacttggagaatgtattttgcttggtcagcttatatattggttatgtttgtttgcttgtttgcattagaaatctcctgctgtgaaggttactcattttaaaggctgcttgggggaggccttcctgaatggaaaatccataggcctatggaactatattgaaagggaaggcaagtgccgtgggtgcttcggaaggtaagatgtcgtcacggtttagcacatagtatgttattctgttaacatctgagaagtgctgaaagaatgtattaatacatgcacgtcaaggaatagagtttgtgatatcgctggtaggtgtttagctgccaattacaaagccatgctttttcatacgtttattgtcaaaaaaaaatcctgtgacattggtataatgtagattataccaatctacattatattattatattatattgtcagatgatataatgtagattagttactgagagaagcacaggtatcatttttaaccctttaaaaagaagtgctctttttcctatgtcttttatgctttgatcatggatcataaaccctaaacgtttcagacaatttctcaaacaaccttctgtctcagagagccacaaccaaatctttataaatcactgtacatttttattttgaaaatatctccaaggataagaattttttcacgtgtggtcagtttttacagctaagtactttccaattccgaaccaagttctataattccagaaataaaatgcattaggaaatagagaaaaatgagtatgtttctgcatatattgatataaaggcattcaatgacttaaccttaccaagtgcaacatcttcccccccaacccattattttataacaaaataactgcaactccttaagtatataaaacctgttttccatcactttagtaattaagacataaattgcttttttccgttagagaaatgtaacatctgatataatttctcttgtctaatgggctgctctgtccagatggatatctgcaattatccagtgacaagatcagttaaagcaactcacagcacatttagaaactcacgggtgaatttttcattttgtcattgtcaggtctgtagtttaagccttctcttttccccttccttcgcttgtttaaaaagttaggaccaggcggtcatggtggctcacgcctgtaatcccagcactttgggaggccgaggcgggcggatcacctgaggttaggagttcgataccagcctgatcaatatggtgaaactccgtctctattaaaaatacaaaaattatctgggcatggtggcacatgcatgtagtcccagctactcaggaggctgagacaggagaattgcttgaacccgggaggcagagccaagatcatgccactgcactccagcatgggtgacagagcgaaactccatctcaaaaaaaaaaaaaagttaggaccagaggtttggtgattgtagccttaagattgaaaaagaatatagggtttggagtcttgagtttctcaggcttctggcccaggtcccccaccaaaattttcttccctgactttggataataagtctcttcacctcactgaggtttggtttctttttccagaaaagaaaaatgatcatcgttcttgtcttacccacctctataaatcacagtgatgaacacacaacatgatgcgtgtgaaaatgctttataaactggaaacactttaccagtcttcaccactggtctcctacagtgatgtggctttgctttgtagataaatgtcacaggatttttttttgacaataaacgtgtgaaaaagcatggctttgtaattggcagctatgataaaaaatgctgttgcctcgtgaggtaatgacacaccctgctctggaacttcagtggaaagagcatctgaattcaggctctctgatccgccactttttccttattctgtgtttccagcaaggaactcttccagcaatttagtaattctaacatgaaaaacaccccgacccctagactctatcccctccactgaccccagatcattaacctcactgttagaaagaaaaatggttaacagaaattaaacatttctagtatgaaaaagtccccctactttacctgtgaccatatcctctattttcatcagtcatttccagaggtattttgaaatcattgacgtcaagctacagcactgaatgaattgaatgatttccggctcttctttttttgttgggatgaggaagtcagctttttaggtggtcacatgttttgttccccttgaaatacctggcctgcctccggatttccacacaccctggacctttgggtcaaagatgctgccctcctgccaactcgagactggctttttgacggagggctggccacccagctgagtagtagaaccacattgactcatcagctcaaccaaactagggtctgattaaatatgtttttctggggactgaacaaatccactgttatattggccaacatttccaaaaatacgtgtttgtaaagaatgctagtttggtgtagggtattaataggtattgtgtactgatcataaatgtttgggaaacactgagttaaaaaaataagcatgtttcttggctgcgaggccatcggagcctttaattagcattaatatgctgacatgcatggtaaccctgtcctggggagaggctagagttgcagcatttcccaaactcacttgagcttgaaccctttctgaaaaggtacctctgggtgagggtcacgcctgtaatcccagcactttgggaggccaaggcaggtggattgaaaaagattagccaggcatggtggcgtgcgcctgtagtcccagctactccggaggctgaggtaggaggagcacttgagcccctgcacttctgcctgggtgacagagtgagatcctgtctcaaaaaaaaaaaagtgcatctggagttgcatctgcctcgtaaaacatattttgtgaagtgctgatataggcacagactggcactttacgtctgtttgtaaattgattgaaccgtcttcattttaggtaacatcccccactgcaccccttctcctgttagacaagaactttagttcaaagagttaataccctaattctagtaacaatccattttagcagacttagattataattccttgtccctttctgtttgtgtataatttgccattattaaatcattagtgtagcccatcgatgtcctctaaatttttaaaaaatttttgactgtttactcttaaacgtgatttatattaccaagtaaatgaattgaaacttttttattcctccttgaatatattattacacttgtacatggggtcactctgtaattatgagcagtctgttatattctcaaaggatgctgcagaattaaccactgattctaacagtcctcatcaaaatcaatatggaaagaccctttatttaattaacaggcataatccttgtattatttacgagtggacattgtgagagagtgctggctacgtggctggcctttgacacgagtcagtcacctgcgttccgggccctctgctaggtaccggccatgtccacatacatcacacatttatgtcctcagacatctcatggcgtaggggaaaatgcctgtatagaaagcagaaaatgcatgggctgtggcaaggggccagagttggagaagcagcatcccaagcccgggccagggttatctcatgccctcgcatgacggcagcagggcatgctagtaggtcagctccggattatccacatctcatgagggagccctcggagaatcagggaggtctggtgattcttccagactcacggggctgagcgctggggagggcggacgctctcctaattccaggctcccacttgaacctgcgggtgatggtggcatttccaaggctggaacagagctgtccacaaagtgctgtgatgaaccgagctttcatttgtcctgggcccttaccaaggcagagacccacttggggaacaggcacctgggccgactgttgaggcacatgtgcctctggtcatagtctggaaactggcaggggctctgggagaagttcagggaagtgactgacatggggacaagccttcggtcatgttcagtcatcatttcatttgaggtccccctcttcgtggccacctcactccagcaggccctgtttggggagagaacccagtagcagagcccccgcgttcttgagagaggagggctcacaggctctgggaagggagaaagcccccatgtttttgggagaggagggctcacgggctctggagagggaagggccatgcactgaggaccaagacaaatttctggagttttgtttgaaacctggctttgtgatttcttggggtgtgtccttgaacaaggtactttaatctttgaggctcagcttttcataggcagaaatgaagaccggcccatcgaggacctccgaacactgcagaataatgagagaaaacatctgttgtgtgccaggcactgttctaagaactgcctggggcagccctcccagagaggttttatggttatccctgttttatagctgaaggaaagggcacacagagaggttaggtgagttttccaagttcacacagctagtatgttggggacctgggatttgaaccctagtagtctagctctagagtctctatcctccggcacatgcactgtggttggccaagaggtagaacaatggaacatatggctaggaagccacaggcttaagaattaaagaattaaaccatagttgaagaatttatctagagtgcatttcttttaagttataattcctcaaagagaccacatgatggaaatttttgaaaaagcaagagtgcaggtagttatagttatacatttgaaacctcaggtttcacaaagcactattttttgttttgttttcttttatcatccatggaaacgattttactgtttggttagactgccttgcttggaaatgtggcactgagttttgttgttacacctctaactgggaacagttcaaattcttacccaaaaactatcctcatccaagtttcactctcaagcctcatgatattccagaaaattatttttggaacataattatgatctgttccagatgaatggctttgcgattgaatagtgagtcaagtcagccttttgctctgttgggggagaagaccagaaaacacactcacctgaaaatgccctgggccgtattatatccctgtttcaacctacgtactcatctctaagtatgatatgggtctttaagctcatcctgcagatttttgaggatgtcagtgatgattgttttgtgaagtgatgcttctggtatatgggcacatacttgctttccatcataactctagtttccctaaggtattagataaaacctcatcagcaaagtgaaaatgtcaatataaaaattattctgaaggcaccagagttaagagaggacagttatattaaaggagattagaataaataaatccagttgataaactgaaatatttatagcagttatcctcctgtaaagaaatgtatttttaccacaatgaatactgcctacattaacattattttccttataaagcagctgggcatttgtcttgcatcttcacatggcaagcatatttttaaatattatcatctacacttgttatgaaagtatggaactaatagctctacagtgatctttgtgaaggagaactcagtaagtgtgttcttggttctttctaccctcctgagaatggattctatttcatctcttctgctttgcagctcccagaatgaagacccttccttccattttgacgggagtgggtactctgtcgtggagaagtcacttccggctaccgtgacccagataatcatgctttttaataccttttcacctaatggacttcttctctacctgggttcatacggcacagtaagagtgtttgtgcggccctaggccctactgtatacacacatttagattgctatgtggttgtttatgtttaatgaggatttactaattaaatatgtacatatgtataccatacaatttttatgagcatatgctagtattaatatatgtgtgtgctaaacaatttcctcattttaaattatttattatcattgtagaacctttagaaaaatatagaagaacaccaagtagaaactagccttctagtctttatagatatcaattcaacatttgttattaaatttcgagctcaaataatatgtcttgttctgggttcactgtgaccaccgtgacattgtttgaattccatccatgggaatttcatgttcttgtttgcatctcatgggctggtgatttctgtctttcagtcttttggttttattttttagaacgggccccttgtcagtctcaatgaaaaagatacgaggagattccacttctcttactgaattgtggattttggtaacaacagatgacatttcatttatattagtgtagtgttctagaaagccttcgtgggcatttttggtttcgtagccgatagacctctggctgtggggccagatccagttttctcagtttgactttagaaggtttcagccatccctgacttgaagggaaagggaaacctgggataaagctataacctggggaactgtgttctcttttttacagaaagactttttatccatcgagctgtttcgtggcagagtgaaggttatgactgacctgggttcaggacccattacccttttgacagacagacgttataacaatggaacctggtacaaaattgccttccagcgaaaccggaagcaaggtagggacacagatggactcaccagatgtcggtcaccctcataagaatagaaatcttttcaaaatcagcattctttttttccacagtagtttcctgggtattgaatgatagtctacttggaagccagtgttgtctttggaatactaaccaacaggattcacattttgctggaggagggttatacttgtatttgcctgtgatttccaagtgtgttatttaacagtaaatgctggattggaatcaagaatcaaatccattctgttttcttccacatgcatactgctcttatttagcaatgtgtattgactttgatagagaggattttcacttgtccttcaatagccaagaacattagctgatcaaattcgcagaatctaaaagaatatgcatttgtaaatgagctttgttgccagaagtttgcattttaccttaacatggaaagggattttccttttcttatctcttgcctgtgctctccttttaggagtgctagcagttatcgatgcctataacaccagtaataaagaaaccaagcagggcgagactccgggagcatcttctgacctcaaccgcctagacaaggacccgatttatgtgggtggattaccaaggtcaagagttgtaaggtatattaaactgcagaattttcatgtcgctgatttccaactttattagcttgctagggctgagaatggactgtatcacaaaccaggtggcttaaacaacactaatttattctttcccagttctagaggctgcaagtccaaaagcaaggtgttggcagggcttgcttccttttgagggctgtgagagagaatctgttccatgctcctagcttctggtcgcctcagggattccttggcctgggtcctgtgtccacatttcccctttttataaggacaactgtcatgttgcataaggacttcccctaatgacctcatcctaacttgattacctctgcaaagaccttttccaaatgaaggccacattcacacataaggaggatcaagactaccacatcttttgggaggacacggttcaacctgtaacatctgcttctatttattcagagtactctatgccatgtgatttgagaagtaaagcaggccttctgcagaaaaattagtgattttatatgtattgcctttagaacgtctaaatcctgttaccgtgcaatatttggagaccctacttgctgtcatacttcatctccctctctctagacattttagagaagtagatctcttttaaggcaaaaggaaaaaaaaaaaaagaaatcatgctttctgcagacttttctggattctcctttgtgtggttagactgaataatgtatgtgcaagttgaaagaccagcatcaagaagtggaatgaaatggcacaggacacacaatggaatccttgtgtaagactgattcatgttgagctttgtgattttaatgatttacagaaactttgtgtggctggttcattgtcctcagttttgtaattttggttgtaattaaactctaaggttctttcacaccattcaaaaaagacatttgtgaaagtccaatagtcaaggtaagacagcttgcagggagtggggtcattagatgtccaaactgggccattcagcgtagtggttagcaaatgtccatttgtagcagtgctctatctttaggtcaagttctttcatagactcctcttatgtggcacagagctgcagccattcagttgctatgatgagcagccttttgtagagagagccacttctccactgtgccccttctctttgccaggtatcttagaaagtcccagggaacacagtttgcaaccacagccgcctcctgatcttagaattgaatccatttaaacctcagcggagttggtcacttgcgaagtcttaccttcctgccaagacggagccaggactggaagctgtctccagatcccatcccagattcatgccctgtcatgctgggaccaggactggggtgttcctgtagcctcggctatgtcctagtacatctggactttgcccagacggcccagtgtagacaacgcaggaaaggacagaagcccatatcacagatgttctcagtagaagggacttaggtgtcatcaaagccagcctcctcgtttacatggaaagaaattgagatctagaaaggctgaaatttgtccaaaatcatatagttgcttaatggtccatagctcattgttcaacatgagaaaaaaaaaaaatgaggtgtggctgtaacaggaaaccatgttattgcaaagctctcctgtgaagagctggtacagaagagtgcagctgggagatgttcagtggtctccatattttggaaattagagctggactacattatagcctgacctcagccaggagtgtggagacttctggtaagaaaaatatgatattgacttgaacattgagaagtagagtttcggataatcccagacttcaccaaatacagttacttcctttaggacaaagttcatggatatgcaacgtaaacaacagccaatgacttcctttgttagcagtcagatcctggcaaatagcattacctgcacttgtccccatgggaagcaaacattctactctacatggagactggattataatctatgtgctgcaatgcactgtgcactgtctttcttataattggcctgtgttttctgtaggtagccatccaagtagccaaactcactaagtttgatccctttctctagtcctaaggagagtaagagagtatttgtttgacctgaagttctcactatcaatattgctcttagagggaggccaagacatttctgcagagtaacacatggaaacaggtattccagaagtatagggttccccccaccccccgccctttcttgttttggggggcaggatcttgctctgtcacccaggctggagtgcagtggaacaatcatggctcaatgcagcctcaaactcctgggctcaagcaatcctcctgcctcagtctctgggactacaagtgcatgctaccatgcctggctaattttttattttttgtagagacagggtctcactatgttgccctggcttgtctcaaactcgtgggcttaggtaatccttctacctcagccttccaaagtgctgggattacaggcataagccactgtgccttgcccagtggctttgtattccttctttcaaaaatggaatttaaaaacccaaattttgtgattgttctcatgcccttccctacaggagaggtgtcaccaccaaaagctttgtgggctgcatcaagaacctggaaatatccagatcaacctttgacttactcagaaattcctatggagtgagaaaaggctgtttactggaggtaggaaacattgttattaatgttcaaatgagtttccataagtgtccattgatttatcaacatcataacacaacaaaccagtggggatagaaaagagatgatggggaaatcagcagtgtcctccccacggaaggtttggccgcagctaggaactcaccatgctgttccatctcctctgtgtccagcccatccggagtgttagcttcctgaaaggcggctacattgaattgccacccaaatctttgtcaccagaatcagaatggctggtaacatttgccaccacgaacagcagtggcatcatcctggctgccctcggcggggatgtggagaagcggggtgatcgtgaggaagcacacgtggtgagtagggccagtgctcctgagccccaagctcaggaaattacttcgggaaacaatgagtggaaaatgactgactcataaacatttattgtcaccgtgttcctggttgtttatggatgtgcattttcaataagtaaaagttattgttgctgaatgtcatcccattatgaatcaatgatttctcatattgcataatccatcttcattgtctggtgactgaggaaaaagttatttgctgtctacctctaattttttaaaaactcattcagatagcatatacggagttttcttccccatgttgtggtcatttttcttcattccaaggccaacagcagtccttaaatcctgtcgaggtcttcagtctactgctggatgaagcaagactttctttatctattataggattgaaaggagcagcaagggaaatgtgggctgtgataagcacagtaaactaacagggggaaaggagagaaatgatgaccattttccttatttatgttccttttcaagagcataggtgatatttccccatcctctgctcaaatttgtgtctatcacataatttgaagagactttacagaatgttagcacactgtcttaatcaagttgagtccatgcagctaaaatctatagaatgccaccttgtactctgcagggtactttacagacattgctgtgtaattaatcacaaccatgctgcaaggggaatgctgcttcctacattttgctgaggaagaaatgtgctgagagagcctagtaaacctgaccaaggtcacaccactggtatgagtcacagtcaggactggaacacaagtttgcagaacccaaacatgtcacgacatacttggggaagggctgacagtgactacgactggttaatgagttccactgatctttttttttttttttgtagttgagctgaaattcatataacctaaaatcgaccatttcatagtgaacaattcagcagcgtttagtgcattcacaatgttacgaggccacctttcctatctagttgcaaacattttcatcactcaaaagcctatgccattaattagtcactccccattctcctctctccccactcctggcaaccaccaatttgctttccggctgtatagatggatttactattctggatattttgtacaaatggaatcatatgatgatgtcttgcatctttcacttagcatgtctttgaagttcatccccattggagcatggatcagtacttcattcctttttatggctgagtaatattccactgtatatacataccacagtgtgttcatcagttacttcatggatgaactttggggcatttctgccttttagctattatgaataaatgctgctatgaacatatgtggataagtatttgtttgagtccctgtcttcagttcttctgggtgtatacttaggagtggaatcactggttatatgataattctatgtttaactttttgaggaactgccaaacttcttctccattagtcttagtaaggttaccttcaaatcaaagtgtgcttactaagtcagcaaaaaggaatgatattagccattgctagcaagggtattgtgagatactcacgttccaattcttctagtgtataaactacctcttttcaatgtgtcgaaaaaaaattaaaagctttaaacattttcacatccttcaaatgtttaattctacttttcataatgttggaaacaacatcacaggcaaaacaattaaacattcacatgtatggtaataaaaagttggaaaatactttaaatttcattgataaaaagacaaattacaatatatctacttattggtatctaatgtagcaataaaccataaatatgaggcaatgcagaatggaaatgtttgaaatcttcagcaataatagcataatgcagaatataaattatatgaacagagattagaaagtaacatacaaaatgtaacattgtgacagctgaagagattcttaaggaattgctctactcacttgatgttaatcttctcacgttatcttcataagatgaaagttttctaaatcatatagtaatgtgttttgtctgggaaattctctatgcaacctccccagcccttcttttccgtcatgctgatcggaggcaacattgaggtacatgtcaatcctggggatgggacaggcctgagaaaagctctcctgcacgctcccacgggtacctgcagtgatggacaagcgcattccatctccttggtcaggaatcggaggtacttgcacgcggccaggcagtgtgtaatgaaggtgtggtgagctcagagggaatgtgggaggaaccttgcggtggtgccctgggcggctagatgactggggtcatcggcatccagacgattctagaaccttgctaggattctttcctgggaaccagtttcatctgctttgtaataagatacttgtagaatttttataattaaacaactttagctctgccctttactggggcccagcataaattgtctttacattggattgattctgtggcaaatagtagtacactattagtaaatagtattatatcaatagtaaatagcattatatcaacattcctgtatatttccctccaaaatatagactgaatgctttaaaagcacactgggcattttcatcataggtaaagaggttaaaaaaaaaagaaaaagaaaatctctccaaaaagcaatctcattcaatggatatttaataacattccattcgtttctgaaaaatcttcagttgtgagttttaattttcaagattcacctttttggtcacagacagtgtcttgttaaaatgaacctttagggaacttttattattcagtgagaacttgtgggaattatggactaaaatggaattattatttcattatgtttaaagcttttcatttattttctccattggtcttttagaattatcactgtccaattggatgagaacaatcctgtggaaatgaagttgggcacattagtagaaagcaggacgataaatgtgtccaatctgtacgtcgggggaattccagagggagaggggacgtcactgctcacaatgagaagatcgttccatggctgtatcaaaaacctgatcttcaatttggagtaagtgtacctgctctctgcatgttcttgcactttctgacctttcatggtgagtgctaacactaatctgaaatctcattgtactgtttgagattgaaaactttgcaaattcccaaataatgagtgaaccccattgttctatcatgtaagtctccccagatggattttattggattagaatgttagacagatctggtcatcatactttaaaaaccatcgctgaacattagctctctgtggctgtccataaagagccgggattttaatatatttttgacatgcatttgaaggaacatagggattttgtgatgtaagtctcttgctgtcctgagagcattgctttgaaggagctgtttactatggggctactagcagcttcaggttatcaatggcttccccaaaaacaattactgtataattaagaaccagaagcctttgggggtccaaggcaggcagatcatgaggtcaggagtttgagaccagcctggccaacatagtgaaaccccgtctctactaaaaatacaaaaaattagccgggtgtggtggcaggcacctgtaatcccagctactccggaggctgaggcaggagaatcacttgaacccgggaggcggaggtgcagtgagctgagattgcaccattgctgcactccagcctgggcgacagagtgagactctgtctcagaaaaaaaaagaactggaagcctccattccctgtgtggagctcatgatgaggaaaagaactgacatgtgcccatgagcagttcattcctccttgctcaccctctgcctctggacagggtgctgatgggacacaagctgtgctctgctctgtgggaccagcatctgcccaggaacacctggaagtgccctgggcatcaggaaattgaagctccctcctggctgggtcactgacttgtctagtgaccttggacaaagacttggatctttcatggtcacagtgtccttatctgtgaaattacctcttaggagtccctgaaatttgcaagaataaaacatagcgttgggtttgaatacaatcataatgtcagagctctggtttagatttttgcacaggtttatgtttattcccccagttgtctgttcattcattcattcattcattcattcattcatgaggcatcctcatgctcctgaaagtcatgggtttgtggactcggtagagcagaaacgtttctgtggagttcccagctgtgcccgggaaagtgccagggggacgtgcgcaggcacaggacacagcacaggagctgcagagtgaaagtgcatgtgacaagcgtagcccacaacctcctggcaaggggaagcacgtaaacaagaaatcagtgtttcgtggaggtcactgtgcagcgcttgggaactagagacaaaaacgtgtccctgaggcagcccagtcaaggctgcaggaggaggcgatggcatcggagctgacctggggggtgctcaggaatggccagggtctgacatggggatatgctaggctgggtgccattgcaagcagaagcttcagacaagaaatattaagatagcatgtttggactctgagtcacagtgaaggattggcactttggttactctaagagaaatatatacatggtttttaattgattttcattgtacagttatcagatgacttgggttcatggactggtttgtgatatcctaattttgaaaacactctcttgtttctacctagacttttggatttcaacagtgcagttggccatgagcaagtcgacctggacacctgctggctgtcagaaaggcctaagctggctcccgatgcagaggacagcaagctcttgccagagccccgggcttttccagtaggagcggcttcctttactatcagtcaggtccagtcagcaaaggagggcctaggacagagggagttaaaatggggccttgctgtaaaggtgcctgcgaaagctggagctggagctggagctggagctgtgctaaaaatcagagcggggacagggagggaaagggtgcctcaagcaactcagatgacacggcccaatccatagattgtaggccccaacacccaggccgcgcattgggctgatgtataatatgcttttggcagagcttctataaggactcattatcaatttacatttagccaggaaagcatgaaaataagtacttcatgtaaagccattgtgcacatatttgttgctttaaaaaaaaaaaaagattcaattcattaggaaaagccagttctggccaaatattttgaatggcagccattgctatttttcatgttctccccttttgctttctctgtttccctggtttaaagtgtgcactctaataatttagaagatggcagaagcattcaagagcaggaccttctgagcagggcgaggctttgagttcggggcagttttcatggtagcatctgcctgtgctgaagcagaaaacagcatctgggacccccatgacttgggcactcttaggacagcccgcagatggttgcgtggggttcaggggcccttcccgcctggctcctcttgtctgcatcctgccctgtcagtgtggacctaggttcacactctgaggccctgcaaaacatgtcacctgtgggcacctccagttttccagtgcctggtccgcagctcgtctcggcagctgcatccttagggccattcccaaaacctcgggtcacggcgggggcctagggggacagcaaggcctttgccccttaagcctgatgaaaatttgtaggagagacttcagtgtccttatgaatttcagtgaagccgagtgggattaaggtgacagacagaagctctaagtgctttcttcagggagataaagcgctggcgagtgcatcatttaaaccgaagatggagtgagcgccaacaggcactggtggttgttgctgttctaatgggattgcttcgtagatggcccttcatggcggaacacgcgtgtgtcagtggggttcgggctgcgggtggcggctgagtgtccctgtgtgtctcttacaggaacagtgtgtggtggatgcagctctggagtacgttcccggcgctcaccagtttggtctcacacaaaacagccatttcatcttgccttttaatcagtcggctgtcagaaagaagtaggtatcattctaacatccttatgcggcgtctcattgctagatgtatgggggtgttctgcagccacagagtcttttccaaaagaacctgcttttattttatgatgaagtgcttgatttgcaaccaaatggcaaagagaaggaattcagtgttggtgcaaatcacaacgctttcatggtggttcactggggagtctgtggtttctgccttttcccttctggagagtggctggcttcccctttctgtgtgcatgtaaggaagcgtgtgggcatctaaattaagtctcctggatctattattgtctggactttcaaccccattccactttaagcattccctagtctgatgtctttgtctacccaaactcttacactgtggtggccaaaatcccgagtgccacacccacccctctctgcaccttctggccctcatacctgcctgtccctgggacccttctgccaagggaagatctcaaggcctggagcttggggctcccggactccatgttgctcctctctcctcctgaggtcctccagctcacctgccaggcttgcctgcagtctctgccatgccctgcccgtcttgttgtcattggctgtgccaccctgtcatacccccttagacctgggctcctgtctgtcttctgcagctcctgccatcactctctgtgaattcaacagctgcctaacacctgacctttctgtgctcaaactgtgatctgtggaaggtctttccctgctccctcctcagccagcctcttccgtggccatacccttgacttcttcacaggtatccatccctctcacagtctcgactttaaaagcctcctattagcacacccctttcttcttgtctccactctgtgcctccccactcctgcagtttctcagctgcatggagacctctaagccgctagccctaatgccctcccaccactatctcccctcttctctagccccaaatcacaattcatcccccagataggttccaggccagtgttacaggtgtcctctgcaaaatcccctaaccctttctctctcccactcctgcgagcccaggtaaaagccaacattccgccttctctgtgccagaacccacacgggagaccaaggccaaggagatggatgtctccttcctagctggtttgagctggatatcatagccgtcaatctcagatggagcctccaaacgacatggggagccagtgcattgctctaatatgttcatggtttttattctccatgactacttcctcatagctgctcttagctcagagccctgtgcaccgcagtccctcttcccaccccagctgatgacttgcctcgttgagaagaaagagctccttcatccgtccaccaccaaaaagaccagcccctgcttttgttcctgaccctctatctcttctgctaccacagatgaagggtacttgttcctagcaaagcccacccagccagccccagcttgtcctctggatcccatccgccctctcctcctaggacatgcacagcagccactcctcacagaccagcacacagatgccgctgtcaccccatcgtcagcagtgacagcaagagcagcaaactattgtgctggaggttgacacaaagatttttacacagatgccctaatttactcctcataattctcctatgaggaaggaattgttattatctccatttaacagataaggagattgaggtatagggagcctgaggcatctgctcaaagtcacacagctggtaaatggtagagccgggattcgaacccaggccttctggctccagagtctgtgcctgtagagtagtttccccttctcctcgggggatacgttcaggacccccagtggttgcctgaaacctcggctagtacctaaacgtcatatacactgtgttttcctatgcatgcatatctatgataaagttgaatttataaattaggcacaggaagagattaacaataataataaaatagaagaattataacaatatgccagcatcactcctcttgtgcctcgagggcattattgagtaaaatcagggtgacctgaacacaagccccgctgtactgccacagtcgatctgcgaacctagacagctataaagtgaccaatgggcccatggctcctatggtgtggatccgctggacacgggcagacatggctcccatggcgtggatccgctggacacaggcagacatggctcccatggcgtggatccgctggacacaggcagacatggctcctatggtgtggatccactggacacaggcagacatggctcccatggcgtggatccgccggacacaggcagacatggctcccatggcgtggatccactggacacaggcagacatggctcctatggcgtggatccgccggacacaggcagacatggctcccatggtgtggatccactggacacaggcagacatggctcccatggcgtggatctgctggacacaggcagacatggctcccatggcgtggatccgctggacacaggcagacatggctcctatggcgtggatccactggacacgggcagacatggctcccatggtgtggatccactggacataggcagacatggctcccatggcgtgaatccactggacacagacaggattcactttctgggcaggaccgagtgggatggcatgagatctcatcacgctactcagagtgatgcccaatttaaaacttatgtattatttatttccagaacttcccatttagtattttcagacctcagttgactgcaggtaactgaaacctcaaaaagtgaaaccttggaaggcaaaaccgcaaataagaagggactgctgtaacctctgtgctgcactccctctctcactttgacttctaaagcagaaccccccaggagacgtcacattcccccgcacacacatgcacagtacctggctctgtttcccagcaaggctcttgaaagagctgccctttcctcagggactgtttcctcgtttaaccatccggtcagcctcccgcacacccccagctgctcttgagagagttactcgagacccctgtgcagctacatggtgcggagccccctgcactgggctctcagcagcccctggacttccttggctgtcacagatgcacactctcctagttccctgctctctctcggcccgccttcctcagtctcccagctgagagtgctgggcccttccacacgctctcccaggatggccttctatgttccgatcaccttaaaatgccacctagatatggcagaacctacctgtgtagctctggcctccacttagaactcaggatttgtgggcccaccagccactcgagatctgcatgtggactgggacaggttcctcagccactcaacatctctgtgtggcctgggacagtctcctgggcctcatcaccccgaatggaattcgcaggcttccctcagtcctgctctcctgctctttgccgttgccgcgggcacaatcaccattcacctggttgcccaaggcccaagcctaggggctatttttcatttcactttttctcactctccaaatccagtccattggcaaatcctgttgcttcttcctccagaacgtttcctgaatctgttctgagtccccaccgccaccctggtctaagccacccgactccctcccgttggctgtcgtaacagctgcctgatgggacccgcttcacccctgaccccctgacctgttcttcagtttagacagaggatctcttaaaggaattctcggccactccccctttcaaagccctcctgtgacttcccactgtgccgaaaatccaaacaccctcaaagcccctcctccctatgttggagccacatctgccctggtgctgtccctgggtggtccagtgacaccgtggtccctctgacagggcctacccaggcgcagccttcctccacacctgcagtaactctggttcccccacggcctcaggtgggcttcctgatgtcccctgccatcaagctctcactttgcaggggcttgcccctttctgtcattcagacctcagctgagatatcagctttgcagagttacccgcgttgaatgcttaaggtagccactggttggcctctacaggacccactttactgtctgatgtgtttctgtattagtttcatgagcaaagggatcttcctctttgttcacagctttatcctcatcctgaaacagttcccggcagacagaggtaggcactaataactcattatatgaatggatgtgtaaatggatgaaggaatgaatacccctctctcctgagatgttcaatgtaaacgctgaaacaattgttgggtcctcttttgaggttttaaaaatgaaaagtaaaagtttcctttctcaacgctgagcacttgttttccccaggctctcggttgagctaagcatccgcacgttcgcctccagcggcctgatttactacatggctcatcagaaccaagcagactacgctgtgctccagctgcacgggggccgcctccacttcatgtttgaccttggcaaaggcagaacaaaggtctctcaccctgcactgctcagtgatggcaagtggcacacggtacgatctcaggaggcttgtggtggctgcttctgagttctgttccatctatcactcgggttcactccatttctcaaaggcacattatccccattaatctctatctcgccgtgtgtgtctggtgtctcccccagagactacaagtcttgaaggcagggatcttttctgcttccgaaatatccccagggccttgcttagtacctgacgtgaaatagacattcagcaaacattggcgggatgaacaaaaggtactagacatgttcttgacttggcaaggagtatgtaaagcctagcctcccctcatggcatttgctttctgataaccggaactctggagcactttctggtgtgcagcacgctttacctgtgcctgtaatcggccagctgggttgttcttgtccactgcccagaaaagcaaatgcactaagagtggcaggttttgcagcaaagaaagagtttaattattgcataggcaacttgccaggagataattctcaaagccgcctccccaagaattcaaggactagggttaaaacctcgtgtaaacaaggatagtttggcagccgggggataaggaatggcaaatgctgattgattggattggggaagaaatcacagggggtcgaagttgtcttcttgtgctgagccagttcctgggtaggggttactgctctgggtggtgccatttggttcatactgaatgcaaagtctgaaaaatatctcaaatgccagtcctaggttttacaatagcaatgttatctatatggggcaattggagaaggtataacacttaacgactattggctacgtgattcctaagcaataagtagtttaaaagggcaaagtataaacaatgactggttagagtttatgcctacatcttagcaggagaaacaatggctggttagagtttatgcctgtatcttagcagaattcaggcccctatcacaattccaaccttgtggcatttccttaattttacaaaggcgattttggtccctgagcaaggagggagttagttttggggagggactgttaaccatctttgttttaaactgtcaactaaattcctcccatttcgggaagggactgttatcatctttgatttaaagttaaactatccactaaattcctcccatttccagaagggactgttatcatctttgttttaaactatcaactaaattcctcccatagctaggttgaattagcaaagacagcttatgaggttagaagcaagatagagtcagttatgtcagattcctcttgctgtcatttttctatgtcagatttctttcactgttacagtttttgcaaaggcagtttcatacctgcctcctttcttctgccaggctcatccacttttcgtcaccaactgtctaaaaatttgaaccttcctttagcattgcattcaggttgttatagctctcagaaacagatgttgcatctgttaaagtttatacatctgttaaaagttttttcagattcctcaaaaattatgcatgttttcactttgctgtaggtcaagacagactatgttaaaagaaaaggcttcataactgtcgacggccgagagtctcccatggtgactgtggtgggagatggaaccatgctggatgtggagggtttgttctacctaggaggcctgccctcccagtaccaggccaggaaaattggaaatgtaagcagcattttccatactgacattttaccttcgttgtgttcgtgtttattttgtagaagagcatacctcacggcatctttatgtttaaattaccttgtttgaacctggggcttgtgaagaggtttactttgcaggcatgtccacagatcgtgtgccagggccgcccctcagaacccgatcagtctttccagcctgttagttaatgaacatctccctttccgcagccacgtggccacagcacaattcagggaagcccagcaaatgcatattcgcacattagtaaactcagcattttttgatttccacaatatttcactaaaataatagaaaacacttccactgcattattagcaaagatactcaaatggtagctctaacttagacattcatgtgaagtattgtggcaattaaagttttaaaacaaaaagattacattttaatgtgttttgctgagaccagtctgatgaagtggaaggaaaatgtgtccaaacccttcccattagaatcaccactgtctactcttgcatgtcatttggcttagatcacccacagcatccctgcctgcattggggatgtgacggttaacagcaaacagctggacaaggacagcccggtgtctgccttcacggtgaacaggtgctacgcagtggcccaggaaggaacatactttgacggaagcggatatgcagctcttggtatgtgttagcaacactctcgaaggcagtccccgaatgagtctgtactctaaagcgatgtggatccaagagtataagacaggacccactggacaaggctgcaggaaaaccacattgagtttagtattccagttgattcctaatttcttggcgtaaaaagccttctcaggtcttgtgctatctggatggcctgacaaagtctcccccaaggagtggtgtgactcctgacagaggccagacatggggtgctagtttcatctatagtttccccaggttctgtaatgcacacttactgtccaagttaagaaagggctttgaattaaaaatcagcagcataaaatgtctagaccagctggcgccagggaggctgtgcagaagtttgggtggggaagagggggaagccagcagaacatctctcgttcactctgtgcttcctttctcctgttcctggggctcaggctccagccctgctgggcagccccctccatggcctcagctccccttgcaccccccagctctgggcataccatcttctccccttttcccttcagccctgggcatggtaacaactgcctgctgttgtcaatagccccacccagtgtggctcctcggcttttttatcacctgaattaaaaaagcattccattcaatccccacctttaacaaacttagtatggactctgatacactcagtaaatgatgattcccacaagtacacagatactaggaaaataaagtggactattctcggatgatgataaagggattccagggatcaaatcccaacagcccacgggaaagactgccgcagggaggacgtgtccacagggtgaggcagggccacgtgcttctgtggccacagatgaaggaggtgcctggctctgctctgacctggctgactgcatgcgtcttctttaaaagctccacgtcatctcccagatgtggaagccgaggctcagagggcaggagtgacctgctggtggggatgcagctggatccaaaggaggagctagagccaggtcccccaacccctagccaggaggccaaatgctcaacctgggcctggcagcgctcaccctgacttgggtcctccttgtgtgttacagtcaaagagggctacaaagtccagtcagatgtgaacatcacactggagtttcgaacctcctcgcagaatggcgtcctcctggggatcagcactgccaaagtggatgccattggactagagcttgtggacggcaaggtgggtgcttcctctccatgagggtcttcctccccccagtgtcagagacagagcaattgagaaacagcagattcaaattcacaactatctattttcatggagtcaaacaatggtcccattactattttaaaaacagatattgctacaagaaaacctttttggtttattttttaaaagcttttcaaaaataactttttatatgtttgaaagtaagctttcagcaaaattacaactataatacaaagaactttttttcctgaaccatctgagaataagctgctgacctgatgccctatcccttctaataattttttttaactttttatttggaaattattacagattcataggaagttgcaatgaaatgtacagggagggccccatgcaccattcacccagacccaggtttcccagtggtagcactatgcattttttttctttttgagacggagtttcgctcttgttgcccaagctagagtgcaatggtgcaatctcagctcactgcaacctctgcctcccaggtccaagtgattctcctgcctcagcctcctgagtagctgggattacaggcgtgcaccaccacacccggctaatttttgtattttttagtagagaccaggtttcaccatgttggtcaggctgttctcgaactcctgacctcgtgatccgcccgcctcgcctcccaaagtgctgggattacaaacattatgcatttttctagcacaatcaagatacttaattgtatcaatactacaaggctcccccttaataccccatcatggccacacccaactcctgtacccctaatcctaggcaaccactaatctgtttgctgtccctctaatttctgttttgccagtgttatataaatgaaataacgcagtaggtatccttatgagatcagcttttcacactcagcctgatcttgggaaggtcatctgggtggttgtgcatatcaacagtccgttcccttttgtggtggcgtattactctgtgggatagacgtaccatgctataatttttttttaatgtagaacatgttatttttttctgtgactgttctgcccttgcttttcagcctctcatgtccctctcctgctggcaacaaaatgaactccacaatttgcagtactagtcctttagtctcctgcttgaaaaccgcctccttcacagtttctcccagttctcacttcccttcctctcccctttggggctgtctgggcgcaggcaggatgcggggaagggagtctcgatggcccttttcctttctgtgggctctctagtggacagcagctgagccatagccatatcgtggtcttcagggcagcctcttacagtgagtggtctggggtctcagtgttgcccctgcatgggggctgctcctggagagtttggccagcgtccatttcagctcaggcttctcatcctggttgtcatgagtagtgccacctcttcatcttcccgcttccccgtggggtcatgtgcaaacttggggatttctgccaagccacacagaggccatggggaatcagggatggtgtctctctggtcctctctctacctaactacattttaccagcatttctgcagcactgtggtcaatgtttgttgttgtgggagtaagatgcctgaattttccaacactagtgcctcttggaaggcaaggaaaaagtctccatgttctagattccccaggacttaccggttgtttctggtatttccctacttactccccgctgggttttgacccctaggatatcctagagtgggggtggggaggatctgaaaggtcatgtctgaccttttgcccttcacctcttttccgattcatgacaaaccagaactaacttgatgtcatattgctgcctctctacactgacttacagccaactttttccctcatctatactttaaaaacttttgtatctatttgcatgtttttatgtgacatctaaaaaatgttaccagggccagatatggtggctaacacctgtaatcccaaaaccttgggaggctgaggcaggaggattgcttgagcccaggagtttgagaccagccagggcaacatagcgacaccccatctctatttttgaaaaatattttatttagataaataaaaaattaggaatgcaatcagaagtgtaattgctgcaaacaatgtaattttctgttgtattatacattttacttcttattggattattatgcatagttcttttttaacatttttagttgttacctaagggtttatgacatatccttaattgtcacagtccacctagaaataatactgagcagtttcatatatagcataagaatcttcaaaaagtacatttgaaattctttcctcctgtcttagtctgcttggggtgccagaacaaagtaccacagactgtgtggcttaaacaatggaaatttattttcttgccactctagagactagaagtccgagatcaatgtgttagtaaggttctttattctgaggcctgtctctttgacttacagatgcctcgttctccctgtgttctcacatggtcttccctctgtgcatgtctgtgtcctaatctcttcttataaagacacagtcagattggatgagggccaccctagtcactcatctttacttaattacctctttaaaagctccatcttcaaatacaatcacattctgaggtactgggggttaggacttcagcatatgaattttggagggcggtcttcagcccataacacctcctatcctttgcaaagctgagatctctttacttgctgtgggagagcatctacagttcatcagaagagagttagtaaatattcgctcataggtgctatcaataggtatgaccgggccaggtgcggtggctcacacctgtaatcccggcactttgggaggccgaggtgggcaaatcacctgaggtcaggaattcaagaccagcctggccaacatggtgaaaccctgtctctactaaaaatacaaaaattagctgggcatggtggtggatgcctgtaatcccagctatgcgggaggctgaggcaaaagaatcacttgaacccaggaggtggagtttgcagtaagccaagaccgcgccactgcactccagcctggacaacaggagcgaagctccatctcaaagaaaaaaaatgaaagtatgaccagcacctccagtaaggctattagctcctaaaatgtcctaaaattgaggccctcatttaaggatgcagtgtgctcagacttgtggtcatgaaggtggccatttgcgctttctggaatttggggactagtataacatctgaatcttttttttttttttttttttttgagatggagtttcgctcttgttgcccaggctggagtgcaatggtacgatcttggctcaccgcaacctctgcctcctaggtttaagcgattttcctgcctcagcctcctgagttgctgggattacaggcatgcgcctagctaatttttttgtgtttttagtagagacagggtttctccatgttgctcaggctggtctcgaattcctgacctcaggtgatccgcctgcctcggcctcctaaaatgccaggattacaggtgtgagccaccatgcccagccatcatctgaatcctttaaaaggttacttttcaaaactattttctgtttctcctagttagctctccttttaaacataatgctgcaattttatctactccaagagcttatacaaatggactgtgttccttaaatacacaaaaactcaccaagatatttgcttttaggtcttgttccatgtcaacaatggtgctggcaggataacagctgcatatgagcccaaaaccgccactgtgctctgtgatggaaaatggcacactcttcaagctaacaaaagcaaacaccgtatcactctgattgttgacgggaacgcagttggcgctgaaagtccacacacccagtctacctcagtggacaccaacaatcccatttatgttggtggctatcctggtatgtacgggtacctgctcttccactcaaaaggggcactgtccctggaggaagtcttggttcaggtggatgtagaatagggattgagaaaggtacatggtttgggtgacaaatcctttaccattttagaaaggctatttcaaatatctaagaattcttggataacttaaaataatctacatacacaagttaatcattgggtaagactgtgagaacattgggtctgatataaaggcagccgtatgactctaccgaagtaaatttcatgactgtcagacttgggagtcattttagggctagggaatcgttttaggaaacaaacttgtgactcatctctctggtcaattttggattagaattatgtattttagatgttccaaggaattgttgcaaataataaacacctgttgtatgactttttttaagttataactatgccttaaaattttatatattaaaagtttttggccaggtgcggtggcttacacctataatcccggcactttgggaggccaaggtgggtggatcacttgaggtcaggagtttgagaccagcctggccaacatggtgaaaccctctctctactaaaaatacaaaaataagctggacgtggtgacgggtgcctgtaaccccagctactcgggaggctgagacaggagaatcacttgaacccgggaggcagaggttgcagtgagccgagatcgcgccactgcactccagcctaggtggcagagcgagactccatctcaaaaaaaaaaaagttttctctgaattctgctagtcactgacaccacatatgtggaagatattctcctaattttgatagtgaaaaatttaaaaaataaaaaaacccgcttgagattatttctgttgcttttgtgctatggatcgcatttcaacaaaattaagcaagatttgtcttctcttctttcctgaacagctggtgtgaagcaaaaatgcctgcgcagccagacctcgttccgcgggtgtttgaggaagctagctctgattaagagcccgcaggtgcagtcctttgacttcagcagagcgttcgaactgcacggagttttccttcattcctgtcctgggaccgagtcctgaacttcaagcagaatcctcagttggaatcattgctaatattttgaggagaagtgtatgtgtgaattaagaatctcttcagttcatatttcatttccaactcaggttaagtgtttctggggagagatgttgtgtttacgttacactaaaaccacatgtgcaacaaatacctccattaaatggtctaaaatgtaaattgaattccctggctctctttttaaacgtatttttaaaaaaatctttatacacattgaatgttctgttgattacttgatagtattttatgtttttcattttgagctttttaaaaaagtatcaatacagatgataacagatcaga

SEQ ID NO: 125 - DNA, 40684 bp, Homo sapiens
aggggcggggctgggcggcaggtcccgggtgcggacatctggcagctggcagtgggcggcgtagagcactgcagcagcaatgacggagggcacgtgagtcccctcgccccgggctcctgacgaatgcggggtggtcctaggtgctgaggagagcgcgactggggcagtgggccggcggccggcgttggggcggggcctgggtcgctgatggccggtggtcctcaggtgtctgcggcgccgagggggcccctacaagaccgagcccgccaccgacctcggccgctggcgactcaactgcgagaggggccggcagacgtggacctacctgcaggacgagcgcgccggccgcgagcagaccggcctggaagcctacgccctggggctggacaccgtaagttgcttccgcggagcgtcagcgagctcgggaccctgaggggtgagccgtgaggagcacgttttctctcagaaaggcgggtgggaggacccggccagcgacgcccatccccaaggcgagcgcccacgggaactgcgttcgcgggcccctccgcttcagccccttcatctctaaaccacgcataggagactcctaatgttttattttttagcaccttattttgagataatttttgacttataggagagttgcaaagatagttgtaactttgtttttattcacaaaaagtgtttggatccactgtcttagttgtgtgcattgtaagagattttggtcgtcagagtctgcagtgtaaacagggtctcctgccgagccccggccaccgagggaaaggctgtgccgccccttgggccctctttgagaggcccgagtcccaggcccaggtcggcacccgtgccccaccctacagtctgggtgcctggtttattccagacatcttggagaagttgtgaagaatacatgactggcaaataaagcaacgaaaatgtgcagctgttcttttactttgctgaggtgtgatgctctcatcaaagagtttcagacttttgatggaaacagctgaaacttttaaagtaatttacattcactgttttgacttgggctgtatgtgaagagggttcctctggccgggcaacagtcccgtcagctatctctttttttttttttcgatctctttgcagaagaattactttaaggacttgcccaaagcccacaccgcctttgagggggctctgaacgggatgacattttacgtggggctgcaggctgaggatgggcactggacgggtgattatggtggcccacttttcctcctgccaggtaggagtatgctgccccagcctgatggtatggccaccctggatcacccttgggatcctggcccagcctggtctagggttttgatgaagcaggtgaaaatccaggggctcacaagaaaagggctggcaaactctgccctatgtcagagtcgtcctgctattggtctaggggatcagctagccttgccagtgtagggtgacaggctctctgataagagaagcaagtggttctctagggctctgtgttgccttgagggaggaggaaggtgggctttgaagtctcagtacaggatgggatggacattccaggtggaaggcccagcctatgccaaggggctgtaggtgggcagagtggtgggtggggagctgatatctgctgtgaacttcctcggggctattgcaggagagcttcaggttcaggctggtgagtaggaggagcatagcagttggactgcctgggtattgaactgatttggctacacaagactattttgcatcctgggagtgtttctctacagaaatcctcagccttgtaaaatgggaaattccctcctatgaatttatgcaataggacttttttccctagtgacttgtaatcacattgtttcaatgacgtgaattcctacataaataggttttgtttctgtgataactcttactgatacatcattttcttttactacgctgactttgtaatagatagaaagtccttatatacctttgttgcctttctttttaaaacatctcttacctgtgtctattcatttactcatccaaattgcctttatcctgattttgtcccagacttgaaatgaagttgcaataggcttatatgttagtttgggaagagttggcctttaacgttaaaaacagttccatggtgtttactgtaggccaagccctgctcaaggcctgttcttcttttagtccttagaataagcctaatgagatacattagaaagctgaggcacatttattccaggtaaccagactagcaggaggagcactgggatccccatctctgctttgacttctagccctgctgccacctggactgtacagcattgagtttttctgtcctgggatttgagggcctgtccttaggggaagtcaaggtgctcttcttcccttggccccatcagggcctgtttagactgttctcagggctcgtggtaaggcaatgacatagagttggtcaggagatgggtcagccccactttgcctctgtagcctgacctgtgacaggattggaatcaggtttggtcatgtgcacagtgtcaggcatgcagtggtgcttggtcagtggggattactgtgttgtttgttcttgctgctttggctctgggcttagctggctgggacccttcctgtgggctggctgtgagttggagtttttttgtattttttttttttttttgagacagcgttcgctcttgttccccaggctggagtgcaatggcacaattttggctcgttgcagcctctgcctcctgggtccaagtgattctcctgcctcagcctcctgtagggtccagccccacagggtcggtaggtttttctccctgtgtgcggagatgagagattgtagaaataaagacacaagacagagagatgaaagaaaagacagctgggcccgggggaccactaccaccaagacgtggaaaccggtagtggccctgaatgccaggctgcgctgatatttattggatacaagacaaaggggcagggtaaggagtgtgagccatctccaatgataggtaaggtcacatgggtcacgtgtccactggacagtgggctcttccctgcctggcagccgaggcagagagtgggagagagagagagagagacagcttatgccattatttctgcatatcagagacttttagtactttcactaattttgctactgttatctaaaaggcagagccaggtgtacagggtggaacatgaaagtggactaggagcgtgaccactgaagcacagcatcacagggagatggttaggcctccggataactgcgggtgggcctgactgatgtcaggccgtccacaagaggtggaggagtagagtcttctctaaactcccccggggaaagggagattccctttcccggtatgctaagtagcgggtgtttttccttgacactgacgctaccgctagaccacggttgggtccgcttggcaacgggcctcttcccagatgctggcgttaccgctagaccaaggagccctctagtggccttgtccgggcttaacagaaggctctcactcttgtcttctggtcacttctcactatgtctcttcagctcctatctctgtatggcctggtttttcctaggttatgattgtagagcgaggattattataatattggaataaagagtaattgctacaaactaatgattaatgatattcatatataatcatatgtatgatctagatctagtataactcttgttgttttatatattttattatactggaacagctcgtgccctcggtctcttgccttggcaccaaggtggcttgccacccacagcctctcgagtagctgggattacagccatgtgccaccatgcctggctaatttttgtatttttggtagagacaggttttcaccttgttggtcaggctggtctcgaactcctgacctcgtgatcccccaccccccacccccagcctcccaaagtgctgggattacaggcgtgagccactgcacctggctgagttggagcttttcttccctctttttggactttggaaaatgctcttggtccatgatgctatgtagacagctcccattgactgtggcctgtgcggcattgggcagcactctggtgaacactgaatcgggtctgacctcctagccccaccatttactggctgagcctcagtttccttgcctgtaaaatcaggaagatgctggctctgctcctctctgcacatttccccgtcctaacaacattataactgttaggaaagagacgggcttgttttgggatggctcattttatgtgaccctgtgcgctgtctctgagttcatctgcccttcttccagggtgtagggaccagccccacagggtcggtgggtctctccctgtgtgcggcgatgagagagtgtagaaataaagacgcaagacaaagagataaaagacagctgggcccgggggaccactgccaccaatgcacggagaccagtagtggccccgaatgtctggctgtgctgttatttattggatacaaagcaaaaggggcagggtaaagagtgtgagtcatctccagtgataggtaaggtcacgtgggtcacgtgtccactggacagggggcccttccctgcctggcagccgaggcagagagaggagacacagagaaagacaacttatgccattatttctgcatatcagagacttttagtactttcactaattgactactgctatctagaaggcagagccaggtgtacaggatggaacatgaaggcggactaggagcgtgaccactgaagcacagcatcacagggagacaggcctccggataactgcgggcaggtctgactaatgtgaggccctccacaagaggtggaggagcagagtcttctctaaattcccccggggaaagggagcctccctttcccggtctgctaagtagcgggtgttgttccttgacacttttcgctaccgctagaccaccgtccgctcggcaacgggcgtcttcccagacgctggcgttaccactagaccaaggagcccttttgctggccccgtccgggcataacagaaggctcgcactcctgtcttctggtcacacctcactatgtcccctcagctcctatctctgtatggcctggtttttcctaggttatgattgtagagcgaggattattataatattgggataaagagtaattactacaaactaatgattaatgatattcatatatctctaagatctatatctggtataactattcttgttttatattttattatactggaacagctcgtgtcctcggtctcttgccttggcgcctgggtggcttgccgcccacacagggcatgtctggatggtttgaacactagggcttctgatgctctaagccagagtcaggtattcattccatggcacatgtggctggggtctgccctgagacctgtcccgtgccaggctctgggggcacatggctgatggaaccaagcatggggagtgaaggtggagggtggcctgtgagcaccatgcctgagaggaccaggctggggacggaaggttcttagtggataatatttattgtctctgcctcccccctgacatttgcaaagcggcatatgcttgtaaaaaaattttgaaacagaaaaatataaataaataagtaggtattaccacatgcaagggtgaccaattttgtatttttcttcccagcagatgttaaagcaagaccaacagtctcccctcatggaaggcccactgatctaaaatgctggttccttttggaccttcagggcacttgggggagaccttcctgaggtgctgtgcagtgtctggtgtttctcagaccctggtggtcatgggagccaggcgtggctgagtgggctctacaggccctaggcagggagcatcgcctgtgctgtggctgacgttccttctggccctgttcccaaagttccccatgggggcctgggaggaatggcctttccagggggtgtttttatgagaaggaggtagctccctgttggagtgaggtgctcaggaggaaaggggcctggtcttagcagtcatgaccacctgtccccagtgaggaacatctctcctgccacacaggcctcctgatcacttgccacgtggcacgcatccctctgccagccggatacagagaagagattgtgcggtacctgcggtcagtgcagctccctgacggtggctggggcctgtgagtgtgcctgcccctgtgtcactgcacatgtgcatgtgtgtgttctcatgatgtaggagatgcttgggtttccaggcagctgccaggggttaggagtgattgcagctgtgggtgtggggtgggtgagggagagactagcaggcggggagtgggctgaaggccatgcaggtggggcctcggcttcacatcttttgttaaatggattttgtggctgttaggacactcttgagacccacatgtgaaaactgtcagtctgttatcacttaaggcagaagaaaattgcccttgactctgggctggcagcaggtggagacaaggcctgacagctttcctgccatgtggcacacactttgggagcagagccatagcccaaagtggaccgcccttgagctagaagtgttgactcaggcgtgggaaggtgtagagcaggcgggtcacggtgaggaaggagtggggggctcagttgtcatgggaggtgcatgaattcgtactgcagagtggctgctcaggggtctcctgtgttggcatgttatgtcaggttaaggcattttagcattcttagttttctgaggaaactccacagaaagttttgctttatttcttagaagtaaggacagataccggtttctcacctgtcctctgctcctgtaggcacattgaggataagtccaccgtgtttgggactgcgctcaactatgtgtctctcagaattctgggtgttgggcctgacgatcctgacctggtacgagcccggaacattcttcacaagaaaggtacggcatgtgcagcatgtgctgggccaggggttcgtgtcaactcgataatgagctctcacaaacgcgatacagaaagatgcacttgcagctgaaacagtgggcaaaagcacatgagcagggaatttgtcaaagcagaagtaggcagacactgtttaacctaggcatcattttttaaaaaagcaaattaagagccaggcacagtgagtggctcacgcctgcaattccagcactttgggagactgaggtagaaggaccacttcaacctaagagttcgaggccagcctgggcaacatagtgagacctggtctctacaaaaacaataaaatattagccaggtgtgatgatatgcacctgtagtctcagctacttggaggctagtaaggcaggaggaacacttgagcccaggagttctgggttgcaatgagctggttgtactaccgcactctagcctgggtgacagagtgcgaccctgtctctaataaaataaagccaagcaaactaagacaaccaggtaattctgtttgtttcctgaattggcaaaaacttaaacgaaccgtgttaatatgtccaccttctgggggcagcctggctgcaggcaagagcagccctggagcttgcaccttccaagctgatcgtctacctctccaagcccggggctgtccacctctccaagcccggggctgtccacctctccaagcccggggctgtccacctctccaagccccgggctgtccacctctccaagccccgggttgtcttacctctccaagccccaactgtctacttctccaagccctggtctggctacctctccaagccctggctgtccacctatccaagccccggcctggctacctctccaagccccaggctgtccacctctccaagccccaactgtctacctctccaagccctggcctggctacctccccaagccctgggctgtccacctctccaagcgccaactatctttctctccaagccctggcctggctacctctccaagccccaggctgtccacctctccaagccccaactgtctacctctccaagccccggcctggctacctctccaagcccctggctacctctccatgcccggcctggctacctctcctcttgcctataggccctgaggggcaattccagcccaagggaatccatggctcctgctgctccaagaaaacctagtttatgttgtggctctgcagagcctggcctggtcttgtcctctgtgtttcacagaccttccgtagccagtcccacctgccctgctctctgctgcatgcgcaggggcctcctgtcagctcctcagagacccttattatcccagggctcgccatgcactgcctccttcgcctggagcctcttaccttccactcctgccccgctggctcacactttacgtgttccttctttgaggacctcttcctgacctaccgtgccaggtggagtgtcctgttacgcattctcatgagatcctgccttctttcttggtgagcttgtcactattgtcctcagttcactgtcagcctttggtgtcgttgatgctgcgtccccaaggctgctgtccggttcccaccacactcctggcgcctgcctggtgaaggaacgtgtttaggctgcactttgcctagtagctttgtgggtctttattgacttttgcataccttttggggtttggagcagggactcctcagaagcatgtttagatggtgtggctgtgccaggactgctgctgctgaagtggctctggcatggggccagcgtgccggagctactctggagtctagggtcgtctttgttcccatacaggaccagtctgccaagtggagatgacacagactggggcagctcaggcttggctcagagggcgaggctgagtgtgcgctgtcacttccccaccttgccttctccaggcgcatgtgcacctgggcccctcgctcacctgagcactgaggtgtccctggaccttcccaggtagctgtcttcatgtgctccttcctggggccaggggttgcaaacacctctcctggggctggacacacacactcccaggaaagccactggttccacctagggggccgtgtatccaggcaagttctcagcactctggaacctgcttcgcacatgggggtcgcaagatccacatgaggctgcccttgcctcatggagaggggcacacgtgactcccagagggtgaagcttcccagctagaggcagtgcagactttgctgacaggaagcagatgacgtgggcctattctctccccgctcaggtggtgctgtggccatcccctcctgggggaagttctggctggctgtcctgaatgtttacagctgggaaggcctcaataccctgttcccagagatgtggtatgtctgctgttgattgggttgttgggtcgctgctgctgtcccggggagtagagtgacagggaccgtgggtcaggtgcaggctgtgacagcagagaggggtgggcattctgtgggtgggtggagttaggctcctggcagaggccctgatcaagcttgagtcctgtaggggtacagaaagggggaggttcccaattgagcaggaagaaggctgtgccatggatggaggtaccccgagtcaggctgcaggcagggctgggtggcttccctcttgctgtggaagactcagcatctgtagaagtgggggggtgcccctcccccagcctgcacaggggcgtcctgtgttgctgctgctgcgtttgtctcctttgctggtgaatgtgaagtgtgtcccgacgtgacacctcacctgtggactcagcgtgtgtgcctttaaaagatcagtgtctgtggccaggtggggtggctcatgcctgtaatcccagcacttcgggaggccgaggcgggcagatcacgaggtcaagggatcgagaccatcctggccaacatagtgaaatcccgtctctactaaaaatacaaaaattagctgggcgtggcggcgcgtgcctctagtttccagctactcgggaggctgaggcaggagaatcacttgaccctgggaggcagaggttaccgtgagccgagatcgtgccaccatattccagcctggcgacggagtgagactctgtctcaaaaaaaaaaaaaaaaagatcagtgtttgtttttttaaacagaaccacatactgtttaaatacccagcaaaatcaacattaatttcttattatctggtgtgtgttttttttgttttgttttgagacggagtctagctttgtcactcaggctggagtgcagtggcgtgatttggggtcactgcaacctccgcctcctggattcaagcaattctcctgcctctgcctcccgagtagctgggattacagtctcaggccatcacgcccagctaattgttgtatttttagtagagacagggtttcactatgttggccaggatggtctcaaactcctgacctcaggtgatccgcctgccttggcctcccaaagtgctgggagccatgagccactgctcccggccttatgtggtgtcttgtaacattttatggctatctattgaaagcagtggacatctccccagaaaacactcgtgcatatgagtttaccccgttatgcattttgggaagtgagaccctggaaccacacagagcccctgctggcttccttgagtgttgtgggaaccctggtgggggtgtcccctagagagctatcagcagggctgggggggtcccttgtgttagatgactttggtgcgggggtggggggtggggggtcaagttaggggaggcaggaagtgaaggggccgctcaagaaaggacagcagcagtgtcctgatgcaaaggccgggggcttaaccccggaagccagtttgggtggtgacggggaggcacagggatggtgagatcaccccgggagggtagacagagataccagagtagggggcagggttagggtgccgctacctgaggcgggccgtagagcacataggttgggaggtgtcctggggccattcaaatgcccgctggactctgcgcctcgcccgtgtgtaatgagcggcagaggaaggactgagacggcagtcagcacagctgccagggcaggaggggtgtgggttccacacgctggtgctggtgagggcgtctcatctgccccacttgggggggccgtcggtcagtgctgccgcatgggcacgccagggtgctgcttgtctttgctggagttgcttggagggtgggttgggaggtgaaaggaggaccacagacctgaaccactccagctgcgaaatgctggaagtgtaacccaaaatgtgagaaaaaaaaacacccttttaagtaagtgggtgtgaaagtgggccaaggcctgatgccacagtcagggagcagggaaggctcagcattgctcaccctcacttaaggatggggctagcatcacataaggcatcacataaggatgggggctagcagggaaagggagagaaaacacatgaggcacacacagaccctgggaagctggtggagctgtgctaacgtcagcagaccagtgatcaaagacccaggccttggggagattccacagacctacagtttcttttttctttctttttcttttcttttttttttttttgagacagagtctctcgctctgtcaccaggctgtgtgcagtggcacaatctcggctcactgcaacctcctcccaggttcaagcgattctcctgcctcagcctcccgagtagctgggactagaggcacacaccaccatgcctggcttatttttgtatttttagtagagatggggtttcgccatgttggtcaggctggtctcaaactcctgacctcaagtgatccaccagcctcggcctcccaaagtgctagggttacaggcgtgagccaccgtgcccctcctaaagtttcttaaatacacttttaaaagtaaactttaaattttggagtagtttccaatttctggaaaagttgcaaagatagccaagagtgttccctggggccctcacaccatatccccattgttgatgttttatgttaccaaggtacgtttgttgtagctaagaaacccacggacaatcctaagcatttaggagctccatcacctggttttaggatgcaaaatgctgaccgaactaggaggtgcagctcctcagagggtgcacctatggttcaactgtgcccctcaggagcacggttgggaaatgcccgcagatgcactgacgtggtggggaatagccatccaccagtgttcgtgcttgaaagggcccaaggtatggatgctggcggagggggcaggcttgagtcttggggtctcccactgactcctgctgttgccccaggctgtttcctgactgggcaccggcacacccctccacactctggtgccactgccggcaggtgtacctgcccatgagctactgctacgccgttcggctgagtgccgcggaagacccgctggtccagagcctccgccaggtaggacctcatcagggaacaaagtgaaggcctctggggctgggacccacagggcctggggcttctggaatctaaccacacctgtccactcacctggtggccctgtggagcggagagccctgtggagcagagcctccaccttcctccatcctataataaacagtgagcaagctctgcccagaggggacttgtgctatgggacagtcagtagctgtagcccagggttcctgggggggacttccaggactcaagggatgcaggaggcagatgtgcactgtgtcctctggaagcaggcctgaggcgaggtttgaggtgcaggatgtttatcaggcctgccatggggaagaaggaggggcagagggaggaaatgagcttctgggcagacctgggactcatggagctggggagctcctcagagcggtcctcccatagggggccttcatgtggcctcggggtcagttgctggagggacccccacccaggaagggactggcccagggccctgagggcggatggtgggaggccacccctcctggtttgagccaggcctaccaggtgctcccaggccccaaggctcagacactgcccccaccaggagctctatgtggaggacttcgccagcattgactggctggcgcagaggaacaacgtggcccccgacgagctgtacacgccgcacagctggctgctccgcgtggtatatggtgagcgcctcctgaggggccggcagggcagcccagggtcagggtcagggtgtcgcccactcattcacgcactcatcccctgccagcggcactgggccacctcctctgtgccaggccccagggggcgggatctcatcgccctgcccctccaccctgagaaccagctggtcttctactctcaggagtccaccctgtgcaagggtgtgtggtaggaggtgtggggcagcccctcctgggcagggaaggaggagctcagagaccaggcctgggggtgggtgggagggggaaaccctgggaagggcaagtccaggcgttgcagtgcatggagctccaggctgaggccagtgtcatggtgtctggcatccactgacccctgtcccctgtagcgctcctcaacctgtatgagcaccaccacagtgcccacctgcggcagcgggccgtgcagaagctgtatgaacacattgtggccgacgaccgattcaccaagagcatcagcatcggcccggtcagtgcccctgcccggcctctgactgcagcccctgggggttgaggtccgaaagtgaagtcctagaggccgggctgtgagctgggagtggggtttcctggagcctggtgtacctccatttgggaggtggccctctgatcgcacaagtgtctgagggcttctgtcctggacccctgcacgcccagctcagtgaagttgccccaccacactcgaccccccgcttccgtcccccaccggctcttgtcctcagtgtgcctggacactctcctagaggcccctccctgagatcttgctggctagctggctagctgggaggggtgctttttcctcacttggttccctctccccaaacagttcatcattcgccattctcccgtggggtttagacatgcccagggtgggtgggagtagcaggtgccactcctgattcctcctgcctagctagggacttggagctctcacctctgtggggcctgcaggggtccaggtgtggccagttcagtgaccttagagggtgcaattcccgggctgtgctggtgcgtggccgcctcctgacagagtcagcaggccctgggctgtgctgcagctgctgccatagctgtgcgcgtagctgctgcggtgtagtgggttggcttaggcattctctggacatacccaggtggcactgggccactgagtcccaccctgacactgcatctcggattttctgggcctcatgccacctcagtggatcacaaatcctgactgaccctgcagcgggtcccttgttttttgctcagcagtgatgtggttctttgtgggttttggtttaatcccatatagagcacatctgtactaaacgcattagaaacatgcttgcaattggatcttgacttgtgagatgcataagtaaaaagttgggggcctctggaacattctgttctgaggaagaaggggggcaagtggtccctactgctacagtcctgtcttcgcatctcttcctgggcccctcaggccctgtcctctgtcccctgtgttgtctctaaggcacctggtagcccatgcccctctggtttctcctggaacccctcgcttctccctggtggagtgctgctccttctcacagcctaaggcaggctgtggccttggccgacactgcctctgtctgagttgggtcctggggacacagttgttgcccatcctcgctcaggaaatgcctgttagagcagaaggcccctgtcctggccctgagtgatctgcacggcactttatgcctgggggctgctgtggatctggacgagaccttgtccctggaggctgctgtgggtctggagcggagccttgacagggctgtctctcctgcagatctcgaaaaccatcaacatgcttgtgcgctggtatgtggacgggcccgcctccactgccttccaggagcatgtctccagaatcccggactatctctggtgagtgtggctgggatatgctggcggggcctctcacgaagactggatctgagccccagctgcatcccagtgagggggcccccacggtgccatctgggaatactgccagggaatacctccaggaaccagcagtgtcagggcttgtggaagccactgagggttgtctttgaattggaagatttgccacccagtggaagtgtggggtgttcccagaaggtagagtgaggaagggggtggtaggtagcagggcaggttcaggttggcatcaggaggcctgtggacaaggggagcttgtcagccatggactgtgccctggaggtggggcccctgtcatggagggcagagagccgtcccatggtgggaagcttccgctgtacaggcctcttcctctggtgcctcagcactgcacgagggcggcagggctggcacagcctggggtcggggagcctcccgctgccccttgccttgggtgtggcccttctgggtgagtgtgtcctgttttccatagagtgtggccctcacccccaggagcccagcagcccagctggggtggcatccaggccagtgccaggcctcgggaggggacagacggcctctctgggaccctcctgagtgcagggtctgggtagcagctgggcttccagctttctccttgcacctgacttgggcttttttctcctcacaggatgggccttgacggcatgaaaatgcaggtaagggctgcgggactgcggctgcatgcttcctttgcaatcatgtctcccctttattatttttcctttggggttcagaaataactcctcctggaccaggtcccggcagcgtgcgactagaggctgagtcagttgaggcctctggccgtgtccctgtgggtgctgttggtctctgtgtgggtgcccaccgttctcgatgtctgtctgcagctgtcctgtttgctttttgccctgatgatctgagtgggctcagctgtgtaacgacagacccagagctgcagaagctctcatcttgttactgtggcaggaggtggctctggttagtgggggcttctcctccatgcactcttaatttaaggggcttcttcttaaaggtcctgggtggacaggacaggagcctggaggaccgtggtggcgtgtggccgggcctgggagctccccgtggacttggcctgagtgggctggaacccagtcatgaggggcaccaagcacaaggagaggggaggccggtggatcctggctgaccctggtcctgtcctggctctgggggccctgtagaccgcagtcctgtccgactgggctgagcctgcgcccctctgtgcgtgtcagaagcccagacagtgttgccctgtgtcttgtggtctaaggagggttacgccctgcggtgcctgtcttctgtcccccacctgattcagtgtggaaatgtggagtctccagaggtgtcctgggtgtcacatttgggatggatacacgtgggcccagcactgcccgccccagggctacccttggtgccaggtgcccccagccacgagcttttacccagctggccttgagctccccagaggctccccggacactgtccgtgttttgtgaaaaggttttcaaaacacatgtaaagtggaggtgagtagcaagccctagagcaggccctggcctccctgcccctccctgtcccctccctgcccctccctgcccagcgctccctcagcaccgactcatcagtgcacctcaagctgatgagggcgtctgtgttttgacaaaattgctctgaggttgtcacacccaacaaacttatgacggttcctgagtgtagtcctcacgttgtggctggtgtttgtgaatcaggattcaggccaggcctgcacaggccttcagttgttggtctttgagctcctgttagtccagccgtctctcgtggtctcttttctcctcctggaaggtttgttcctgaagggcttcacattgcagatctgactggttgcttcttatgttccctgagtttttgtaaactggccaggccctgaggctcgatcccattgtgtttctttggcgagaatgcttttctggtggtccctgccttgtccctccagtgcacgatgtctggatgcctctgccacacaccaccccctgcccagtccccatgtctgtctggtcagtgcccagctctgtctcactagggtttggtcaccggccctttgaactgagaccaggctgtgtacctgtgagcccagctcggggtgagatttgaggtggagccttcccagccctgtgcagaattcccatcacctccaggtgtactcagaaatggggatcattggccaggtgcggtggctcacgcctgtaatccctacactttgggaggccaaggtgggcggatcacaaggtcaggagatagagaccatcctggctaacatggtgaaaccccgatgctactaaaaaatacaaaaaaaattagctgggtgtgctggcaggagcctgtaatcccagctactccggaggctgaggcaggagaatggcgtgaacccaggaggcggagcttgcagcgagctgagatcacgccactgcactccagcctgggcaacagagcgagacttcatctcaaaaaaaaaagaaatggggtcatttccaggcatcaccatgactgaggtgcgccactgtcattgggtgagagcagctggatgctctatgtgtaggtgctggagcctctaagggatcgtccagtcctagaagtgtcctcagagggacactgtcctgcctggtggcccatgaagaaagggagggctccctgagtctccccgacgtgtgtctgcctgcagggctcagccttctctgaggcccttgtcagccatgaggggtgcccagggctcagagcctgaggctgagcgttggctgggtgggagcccccacacctggccctcaggcgcccattggatcctggaggcagtggctgggagtgggaggggctgcatctgctgctgtaacaccatcctttgtgtgtagggcaccaacggctcacagatctgggacaccgcattcgccatccaggctctgcttgaggttcgtggctccttctcttttctcagcctcagctgaccttcctgtgcacgtgagcccacgcatccacctgagggcagcactgctggccacacacttgccactcctcgatacttccagtgacctgggctctggcctctggcttcagagggtcgtgctgtggagggggcggccttggccagcagccttgggtgttgggctgggtcgggggccttgggagggcaggggctggaggctgtgtgagaaggggagtctggtgaaggctgtttctgagagtgcaggcaggagtgggactccaggctcttcttagaactggaactgcttgggccaggcacggtggctcacacctgtaatcccagcactttgggaggccgaggagggtggatcacgaggtcaggagttcaagaccagcctggccaagatggtgaaaccccgtctctactaaaagtacacaaaaattagccaagcgtggtggcgggcacctgtaatcccagctacttgggaggctgaggcagagaattgcttgaacccgggaagtggagggtgcagcgagccgagattgtgccactgcactccagcctgggtgacagagagaggctccgtctcaaaaaaaaaaaaaaaaaaaaagaactggaactgtttgttatgggcattctcgagccagtactggagaaaaacgagagtggatttttatgccggtgggaatgaggtaggtgggattctgaaggtgtttctggagagccctgagggctgggccacgcaaagggcctgcctacacagggtgctggagaccctctgggcatggatgctggccaggcaggggggtgctggcatccataaatggtctcctgcgcccttccatcttcagtcatatctcatggacttttgctgttttgtctttaaaggtaagtgcagcaggagaccctggcactctctggagatgtctgctggtttgattctggtccccggttggggcaggatgtggccaggaccatcgggaaaccagcgcagccatgctggccgtgcaagggcagctgagcctctctgtcctgctgtctcttccaggcgggcgggcaccacaggcccgagttttcgtcctgcctgcagaaggctcatgagttcctgaggctctcacaggtgaggccggtgcctggggctctgagggggctgaagagggggatcagggctgggagctcctgcaggcagaagtgcccacctcacctccaccctgccctatttcctgcactggtgtttcaggtcacccccaccctcccatcccctccctagcccctgctccatccaccggtcctcctcgggctggcctcacctggggcagctctctgaggcctgcagggtgctgggggtgctggcagtttctgcgtcctgctcatgttggagccactgtgtgcaagggccaggcacgggcaggggctgtgtaccctgagctgcacagcctacacggcacctccatgtctctgaagcaccttctgcccatggaggtgacgccagcctgtggacttgccctcctgagactgtttgcagcaaaagccccggtccctcctgccagatcagctgcccacagaccctgcccgagcccatagtttgacctcagtgtctctcacacgtgcctgcaccccagtctgcagccacagtcatcccatacatgcgccccaacctcccgtgtctcccacaccctgtcccggccacggcctcagccagtgtccctctgcctggaaccgctgccccccagccccgtctccctcccttcagctctcactaggacattgttctgcagggcttctgggtcttcctggcctctgtgtggccaaggctggcacccatcttgggctcaagcagaggaggggcattgtcctgctgtgcctggcccaatggtggcctgctcctgctcctgcctcctgcccaggacttgctctgggtgatggggacttggggaggctgactgaaccctacggcactccaggcctcttcccttctcactgaggtgagagaggcagccagaagctgaggttgttcaggaggcattgggggcgcctggcacagagcacacccgcagagacctgggccccctccctgccttctggccggtggggagatcacaggggagtcaggtgctgactcccagtcccgtctgggctggtttgagccctcgctggccagtcacgtttcccagcagctgtgggtggtgagctaaacaggtgcaggccctcgcgcgcctcgcagcaccagtggtggctgtggccggcagagtaagctcccaggcacgttctgcctctccagtcctgcccagtctgtctcagcgatgtcccagatggggacgtcccgtggtgacgtgttctctgcttccacatttgccctcgatgctgcccaggtcccagataaccctcccgactaccagaagtactaccgccagatgcgcaaggtatgcgggagccagccccatccctgtcccgtcccccaggggaggccgccctcagcagggtgggtccttccctctgaagggggggctcctccctgggggactcctcccttggcgtttttgggtgtcctgctgtggtggatgcctggcctaggggctcatgcttcatgttgctgagctgcctggcacatggaggcacagttggcttgcacacacagccgtgcctcagagcagttccagtggtcacggcacacacaggcttcagaaggacagccgaagtgtagccagtgtgtccggggaaggcagaggaaagaagtagacctcagagccggtgtgggctgtgaccacaggtgcagactgtgaaattaggcatggacccagctgctgctgcctgtttacaatgggggtggggggcacctgggccccatcctgtccgtcgtgagatctgcaggtgttgagggtgtgagctgcacccctgagggtccctgtgctggaagctggaggtctgtctggatgtacccagcttggggccctggctgcacccacacctttggtggctgggcccctgccctgaccgggtgctctgtggtggggagggatgcgtgcggctgtggggaggttctgagaactggggtgtggacacccccagcctggagtcatggcttgtgctctgcagggtggcttctccttcagtacgctggactgcggctggatcgtttctgactgcacggctgaggccttgaaggctgtgctgctcctgcaggagaagtgtccccatgtcaccgagcacatccccagagaacggctctgcgatgctgtggctgtggtaaggctgtggtcccagcagccccgtccatacctcgtgtcctgcagatgagctgcgtgctcacttccactcctgtgggctccagcccagcacacagtccggccaggccgtaggagcttgtccttggatggtgtctatatgtggagaactgtgagctctggctggacccctaggggccttgctgggctgtgtgcacagggccctgcactgcggagctggtgtccagcccagccaccgatacttgggggagccggcgtggcccccaaggtttctctctggtggtttccactgggtgtctgaagagggaatttgttggtgttggttttggtgccacatcctttcagcacatctggcttttgtgtgtgtttcccagtggagaccctgcccttttctggcagcacagacttggtttctaagtcatgggcacgtgtgggggcatgttccctggtggctgtgcatggaggccctgacagatgaggttgcagctgctgcttggggcacccgagggcttggttaacgtggaaatcagctctccgccccctgttcctgccccatcggttgtcagccctagtgttgcctctagagagttccgctgtgccctgggcgcctgtgtgtgctcagcacatgggcgagttctagggtgctctctgtgatttcagctgctgaacatgagaaatccagatggagggttcgccacctatgagaccaagcgtggggggcacttgctggagctgctgaacccctcggaggtcttcggtgagtggtcggccagcactgcggcgcgcaaacccggggctggctagcactgtggtacacaaacctgggggccagcttttcccccttgcccgaggctgcaagggcccaggttcaccggcagatctgtctggagccctccctcagcccaggctgttctgcgctcctccatcccccggggtggcaggatccttgtgttgtggataggagggcatcaggtcagacctaggggacagtggagggttccagtgagatccacagcctgggctggttcctgctcagtccacagggcttgtgttctgtggaggctgctgtgtatccagagcgcctgcagggaggtgtctttggggactgtggggactgtggggacccatgccatgggcagtaggctgctgtgtgtgcatggttgccaccgtactggtcttgggggaggatctcagccctggtccacctctgggcacctcacatacccgccttcctggtcccctccacatcacacatggctttttggggtggggtcgcagctttctgctgtgttcccctcatcttcgctctcaggtagcacaggtgtgtgtcctggaccagccggcgtttgctctggaggttggtcagggaggcagcgtccgggcccgggctcactgcaacactcttgcttgttgtggctttgcctgagctgcagagcctgggcagccagggtgaaacccaacacttggttcttccctccctttcccaggggacatcatgattgactacacctatgtggagtgcacctcagccgtgatgcaggcgcttaagtatttccacaagcgtttcccggagcacagggcagcggagatccggtaaggagggtctcagccattcagtgtgggcgctgccaagtcgggggccaagacccagacgcatcattctgtgacacggccctggtggcccatctcagaagcgaaactcatggaaacatgcaagaggcttcggatgttgtggaatccagtcatatgccctaaagcatacaaaatatctgttaggggctcagaatagcacagttatgatacaaaaatggattttctctctcttttaataatgttaagaagacatcacatacctgactccaccggtgtcccagaaacggtttttaagtaacctttcctgttgaagggtagcaagtattcagaaaagtgtacaggttggtcttcttgaagcaaacaggaagcgaacagtgccagcattagacatggtgacaccaccagagccctcggcccgccccatgacggggccgcccacatgcctgccaggtcgtgggtgtctgttgctcgctttggatcttgtctaggtggactcctgaggtgtggaattcgtgttgccttctcctgctctcctgctctcctgctcgcggttagtcaggtggctcgggtaacagcagcgttctctccctcgggccttcggttgaacacagatgccgcgctatccagctgcctgttctcagcacctgggaggatttcagtctgggttattatgaagcatctactgtgaacactcttgtacttatcttttgggggcacctgggtacccatttctcatggtcacgtacctaggagtggcattgctgtgttagagggtacgttatagggtatgtgatttttgtaggttcttctttatcctatcacgattacatttttttacttttgttcaacctggtgtagactcaccttggtcacaatgcactgtcctttttatatattgctagattcaatttgaagaatattttgttaggattttagcaactctggttacaagagacgctggtctataatttttttttctttataatgtttttgtcaggttttcctgttaagatgatgctggacttagaaaagcagttggaaaatgcttttaaaatactctttggaagaatttatgtaatattcataatatttctgccttaaatgtttgggaaaaattaccggaaatgccagttgggcctggagatttctttgaggaaagtttttaaattagaagttcaatttctttctttctttctttctttcttttttttttgagatgggttctagctctctcactcaggctggagtgcggtgtaatttctttaatagtttataggactgagcagattttccatttttgtatcagtctggggagtcttcccatttccactcagctttacactgattcatgcaaagttgttcagtgtcctcttagatggctctgagcccaacgctgacatcctcctcttccttctgagaatcttatactgatcttttgaaaaaaaaaaaatcttagtctttgattctgtttttaaagagactttatttttggtttcatcaatttctattgtttgttattttctttctttcttaatttttttgagatggagtcttgctctgttgctgaggttggggagcagtggcgtgatctcagttcactgcaacctccgtttccggggttcaagcgattctcctgcctcagcctcccgagtagctgggactacaggtgctgaccaccatgactggccaattttttggtatttttattagagacagggttttaccatgttgtccaagctggtcttgaactcctgacctcaggtgatccaccttccttggcctcccagagtgctgggattacaggtgtgagccaccacactggcctttgctattttctttctcctttatttttctaacttgaatacttagatatttgattttcaggcttttattgaaatatgaatttgaggctataaatgagttttgagatatcattcagttaaatgtgtgttctggtgcttgctgtggtagcacagatactaaaagtgttttctgtttctactgttcttctctggcccatgagttatgtgggagtatgctgcttcatttacaatctgagaatgttctggtgtggtttttttggaagccgtggatggagcaggggttttcttgtgcttcacaggtgcagctaggagggcactgtgtccagggtcttctgtcggcctggcgtggccctcggccatgtgctgctctgcggcatgaggtgggcgtgagttgtcctcagccacatttagagaattggccttttaaaaaatagatcatcttttaaaaatcactgtaataaaagtaaagcaggttctttgcaaacaagacttgcaaaatacagagaagcgcaaagaagaagctaagtcgcccctcctcgcccctgaaggagaatctgctgttgctgtttggtctccacatttccatggcggcttgctgcccctttcacgcctggcccactttgtgcctggtgaggtttctaaaagccccaccattgagcgcgctcctccagcacgagcagtaatggcacaggtgttgtgtcattttactcagtagcctctgggttatttttcagttttccttgttgttttttagcttttccccattttaaccttaactggtattttcttgttaaatatttattcatgaccattattattccctagagccacatggcttggggtccacctgcctgggtcagcccccatccctgccccttctggctgtctgacctggcctggtgacttctcttctctgctcatctctctccctgcctgagtgggcaacagtacagcctcacagagtggtgggattgtgtgagatgccacagggaagcacatgtcagttgttgtcactgtgtagaacaatgagtcccggatgtggcccgcaggggagcaatggtgacttaatcgcgggcttcctctgcatttctttggtgacttccaagctagaacattctttttttgtttatttgtttgaagcagggtctcactctgttacctaggctggagtgcagtagcaaaatcatggctcaccacagtctcaaacttccgggctcaagcaatcctcccacctcagcctcctgagtagctgggactacaggtgcataccatcacctgtggctaattttttaaatgttttgtattttttaaatgttgctcaggctggtcttgaactgctgggctcaagcaatcctcccacctcggcctccccaaatgctgggattacagagtgagccaccacacccagccatttttaaaattttcaccaggaagttttttctttcatttttaagcacagtaagtatttgtgtattatgttacagatattttcccctcaatttctttgttctttttatctctttagggagtatgaacataagtttttaacttttaaatggttaaatatattagtgtgatttttatattaagattttattttatttattttttttttttttgagacggagtctcgctctgtcgcccaggctggagtgcagtggcgggatctcggctcactgcaagctccgcctcccgggttcacgccattctcctgcctcagcctcccaagtagctgggactacaggcgcccgccactacgcccggctaattttttgtatttttagtagagacggggtttcaccgttttagccaggatggtctcgatctcctgacctcgtgatccgcccgcctcggcctcccaaagtgctgggattacaggcgtgagccaccgcgcccggcctatattaagattttaaacttgccgggcgcagtggctgacgcctgtaatcccagcactttgggaggccgaggcgggtggatcacaaggtcaggagatcgagaccatcctggctaacacggtgaaaccttgtctactaaaaatacaaaaattagccgggcgtggtggcgggcgcttgtagtcccagctactcgggaggctgaggcaggagaatggcgtgaacccgggaggtggagcttgcagtgagccgagatggtgccactgcactccagcctaggcgagagtgcaagacaccgtctcaaaaaaaaaaaaaagattttaaacttacctggagagtttttgagatacagtttggagttgcaagttactttaacactatttatatggaatattctattttactagacagacttaaattctcccttaaattcacaaatttatagaaaagttacaaaaatactgaaaagtgctcctgtttactctgactagaattctttagtgggtggcaccctaccctgagggcttcatgacctgtcctcccacatgatccaggctctaccctcagggcttcatgacctgtcctcccacatgatccaggctctaccctcagggcttcatgacctgtcctcccacgtgatccaggctctaccctcagggcttcatgacctgtcctcccacgtgatccaggctctaccctcagggcttcatgacctgtcctcccacgtgatccaggctctaccctcagggcttcatgacctgtcctcccacgtgatccaggctctaccctcagggcttcatgacctgtcctcccacatgatccaggctctaccctcagggcttcatgacctgtcctcccacgtgatccaggctctaccctcagggcttcatgacctgtcctcccacgtgatccaggctctaccctcagggcttcatgacctgtcctcccacgtgatccaggctctaccctcagggcttcatgacccttcctcccacatgatccaggctctaccctgaggacttcatgacctgtcctcccacgtgatccaggctctaccctcagggcttcatgacctgtcctcccacatgatccaggctctaccctcagggcttcattacctgtcttcccacatgatccaggcccattctttcttgaaccattggaaaggaatttgcagataggatgtgtacccctaactgcctgagtatttcttagcaggtgtattcttttgtgcaagtgtaagtcagaatgttaatgttgatgaaatactaatctgcaggcctaattgttccaataatgtcctttatggcaaaatcttccctcaagctttaatccaatatcatgggttgcatttgtttatttttaattatttttcttttctttttctgttttccttacccttctcactgtgcacatgggttgcatttagttatcacattgacacccttttaacctggaataattccttaatctttccttgtgtttgatgactttgtcatttttgaattgttccacaagttattttgtagaatatcctcagtgtttttttttttctggtgtctcgtgattagattcaggttatgaaactacatttttgtcaggaagattgcagaagaaatggggccttctcctgcaccttaccaggaagcacacaccaactttgatcccttgattaaggtgatgaccgctgtacttagtttctccgctatgaagttgctttttttttctttgtggggagacagttttagactatgtaaacgtcctatttctcatcatacttatacctgttagtgttagcatttgatgatgattcttgcctgaatcaattatttgcataatgcttacaaaattatcattccttccatatgtattagttggtgttcttccaaaagcttttcctttgcctctgtttatttacttatttatcactgtggacgcatagattcttacgcaattgattttgatactgatctcatagctagacaattttgctaaacttttaaaaaaatttatgtactttatcttttatagcagctttaaatttacagaaaatttgagtggaagatgcagtgttcccataaagccgctaactcctcgcaccttccctcaagtttccccagtactaacatcttgcattcaagtggtgcgtttgcaacattcataaattattatcgtccagagtccattgtttacattcagcttcctcttcatgttgttcattctgtggtttcacagatgtgtgatgcacgtgcccaccactgcagtgtcacacaggatctcactgccccggagtcctctgcgctgtccccgcctccagaaccccttagtagcaaacactgatatttttactgtctccatagttttgccttttcagactgacctatttcacttagtaagaagcatttaagattcctgagtctctttctatggctcaatagcacatttctttttagtgctgaataatattccattgtctggatgtaccacagtttattcattcacctactaaggtgaatgtcttgcttgcttccaagttttggcaactatgaataaagttgctatcaatgttagcgtgcacataagttttcagctcatttgggtaaatgccaagaagcatgattgcgggatcctatggtaagagtgtgtttagttctgtaagaagctgccaaactgtatcttaagtggctgcaccatttgcgtttccaccagcaatgatgagcgttttgttgctccacatcctcaccagcatttgctgttgtgttttgggttttagcctttctaagaggtgtgtagtggtatctccttgtttcaatttgcaattccctaatgacattatgttaaaatcttgtcatatagttatttgccatctgtgtatctttttcagtgatgtgtcctttaaagtctttggctcatttttaaattaaattttcttattgttgagttttagttcttcatatattttggctgccagtcctttatcagatatgtctttcgcaaatattttctgcctgtgtcttgtcttttcattctattaacagtatcttttgcagagccagttttcatttcaaggaagtccagcttatcaatgttctctttcatgtatcatgtttttggtgttgtatctaaaaagttactgccaagcccaagggtacctagattttttcctgtgttatattctaggatttttaaagttttgcattttacatctaggtccatgattcattttgagttaacttttgtgaagggtttatggtttgtgtctagatttttttttttttttttttttttgcatgtggatgtccagttgttttggtaccatctgtcaagaagactctttttgggtcattttgttgcctttgtttctttgtaaaaaatcagttgactgcatttgcatgggtctatttctgagctctctgttccattgcattgatctgtttgttcttctcagcaatcccacactgtcttggttcctgtagctctgtagtaggccttgcagtcagttaccgcccctgttctcacttcagtgttctcttcaatagtgttttgactattctaggttttttccctctccatatacattttagagtcagtttgtcaatagtttacaaaataacttgctgagactttgattgggattacattgaatctgtagctcaagttggaaagatcttttatttctttcatcagaattttgtagttttcatcatatatagatcttgtacatattttgttgtttatacctaaggatttcatttttttggtgctaatgtaaatggcgttgtgttttaaatgtcaaaatctaattgttcattgctggtaggaaaacaactgaccctttttttttttttttaagggacgcagtcttactctgttgcccaggcagagtgcagtggtgccatcatagctcactgcagcctcaaactcctgggcttaaggaatcctcctgtctcagcctcctgagcagctaggaccacaggcatgtgccactacgttcagctaatttttcaatttttttgtagagatgggatcttgctctgttgcccaggctggtctcaaactcccgtctgctttgagatgattatatatttgtgtcctttgttaatttagaggattattatggatttttctaatgttaagacacctttgtatttctgagatcgaccttagtattggtctatatttaagacagtattcagtttctcagttgttttttgttttttgttttttttttttgagacagagtctctgtctcccaggctggagtccagtggcacaatctcagctcaccgcaagctctgcctcccggattcacgccattctcctgcctcagcctcccgagtagctgggactacaggcgcctgtcatcatgcccagctaattttttgtatttttagtagagacggggtttcaccatgttagccagggtggtctcaatctcctgacctcgtgatctgcccacctcgatctcccaaagtgctgggattacaaggcgtgagccactgcgcccggcagcagtttctcagttttaatttggagttttgcatctgtgttcatgagtgagcctgaaattttcacttttccatatcttatttctctgggttcctagaatgagctagagagtgttcctcctttctgttctctggaagagtttgtgtgagattagaatgagtgtgtctgataatttagttgcattcatttataaaattcctaggcctagagttttttttctgggaaaagtttacattttgactcatttttttagtagttttaggactgtttaggttctctatttcttgattgagccagttttgataagttaatctttctaatttgtagatattttctctaagtttgcaaatgtaatacataaaactttcttgtcatttctcaccatatctgtagttctatctttttattgctaatattactaatttgtactttgactatttgtatttgttacctgttgccgagtaacaatattagtacaaacctagtggcttagaacaacacacattgattacttcaccgtttctgtgtgtcagaagtccaggcgcggcctcgcaggtcgtcctctgcctcagggtctctccgggcttcagtcagggtgttagccaggaccggggtctcgcctgagcttccagtgaggaaggatctgcctctgagcacacagggtcctcggcacgatcccattcctcagctggaagctgccgactaccgtctgctgcggggcctctctagatggcatcttcacaaaagcgagaagggagagttggtagagggagtctgctagcaccatgggagtcgcggtcacacagacctcggtcccaggacccgcacccatcaaccctgccgtgatctgctggttaaagacaagtcccacgtcccacagggtgacactggagtagacacttcgctctggccttttcagagaactggttattttttggaaatatcagttagatgtaggatgggtcttgtcttctaaatctattgttttctctctaattgattttttcctgtttttatttagttcactttgttgggtttgctcaagcctgggtcactggatctcagggatgctgctcctgtttgcagctgtgtctgcaggggcttcccaaggccttgctttcccctcacgtccctttctcagactctgccaatccgcttcccgctctggtgtcctgtggttgcttctttttaaaaccctcatcggtctgtgtaaactgtttatttttatgtggtttttaagggagaccattctcattcttttgagaccctggaaaggatggaattgggataggtaaactgctgttttaccagaatgttcactggaccaatctcgtgttccagggagaccctcacgcagggcttagagttctgtcggcggcagcagagggccgatggctcctgggaagggtgagtgagcctccactcgtgagtgcagagatgcacgggatccacaggtttctgctctcacacactgcgttcataaatgttggcttgtatgttgttgctacaccagaagtttctggaagtgagctgccagcccgtgacttctgggggacctcgttcctttgtggcatgcgtggcctttgccccggtggaaattgctcagtacgttgctgggcgcagccgggctgctgggagcgcgctgtagcctgagcgtggctattccctccaccctttctgcttgctcttagggtccagcagacagagctgctgtcttccacggccttaatgcctgaggcactggagttggtgggctggctggggcacgtgtgattgttgcagaatgcgtgttgtttcacacaccggctgtgaacagggtggaagggctgaggctctccctgtttccctccagctcctggggagtttgcttcacctacggcacctggtttggcctggaggccttcgcctgtatggggcagacctaccgagatgggtgagtgagtgcctgtcctctggtgggtgggggttctcaacccaatgctctgtcatgagtgttttttgctttgacatttggttttagggtttgtttgtttgtttgtttgtttttgagacggagtctcgctctgtcaaccgggctgacatgcagtggcatgatcctagctcactgcagtctcaaactcgtgggctcaagcgatcctcccgagtagctgggatcacaggtgcacgccaccaccccgggctaatcttttaaaacttttatgtagagatggagtcttgctgtgttgctcacactggtttgggctcaagcagtcttcctacctcggccttccaaagtgctggggttacaggcatgagccaatgtgcctggcctgtttttaatatttttaaacagtgagataagatccccggttgaaatgaagatgtttccctggtcccacagctctctggagcttcctgacatgtatgctggagggacgcttctggtctccggcccctccaggcatacagatgcctcccaaccctgagtaggaagattagggtccacggcctcgctggagcgggttagaaggcaggagatctccggtcccagccgtgtctccagccgccggactctctcccagccctgtctccagctgccccactgtctcccagagtctgccgtgtggatgtttagaggtggggagcaccgtgcttggctgagtgcagcttgtgagacgctgctcccaagcactgcagacctcactcagcctgacgcgtccgtgaggccatcctcggtactcgcatgtccctttgtcttcccagcgactctgggaggcaggagtatctgttcccagttcacatctgcaaaagtcaagctcgggtttcagtagtggcccatggcccttaggtagggtggccccatcgtgcaggctcctccccgtaccccaaggcagcctgctggggtgagaagccaggggtctgggaccttccttggtgtgatggtgtctcctgtctctggtctttgcaggactgcctgtgcagaggtctcccgggcctgtgacttcctgctgtcccggcagatggcagacggaggctggggggaggactttgagtcctgcgaggagcggcgttatttgcagagtgcccagtcccagatccataacacatgctgggccatgatggggctgatggccgttcggtggggacgacgggaccgtccctgagccttgggtttgggtagaggagggacactcagctgtgagccggtggcctgggctgagtgaatgtagagaggaggggaggcctgtgggccaggtcagctgccactctgggaacagacacctacaagagccacatgcctggttcctggggcaagaacgtgggctgctctgaccaagtggggccctgcagagaggctcgcctcttagaagtgaaccacccaccattagccatgtcagtggaagagcaagcacatcagggacccatggaaacagcgaggtgggctgcgatgaggatgctgcttcctggtgtggtagtgatgacggtcacagcagctgctctctgtggccctactgtgttcacagctggtgctgagccacatatgtgccaggtgcacacacacgcagacgcatgcaggcaggcatcagtgtacacactgatgtgcacacacagatgtacatggagacagatgcacacacaggcctatgcacacacgtacgcatgcccacacaggcacctgtgtccacacacatacagatgcacccacagcatcccatctgtgccacacactgacataggtacatggagacagatgcacacacaggtctgtgcacacacgtatgcatgcacaggcacctgtgtacacacacgtacagatgcacccacaggatcccatctgtgccacacacagacgtaggtacatggagacagatgcacacacaggtctgtgcacacacatacatacgcatgcacaggcacctgtgtacacacatgcagatacacccacagcatcccatctgtgccacacacagacataggtacatggagacagatgcacacacaggtctatgcacacacatacgcatgcacaggcacctgtgtacacacacgtacagatgcacccacaggatcccatctgtgccacacacagacgtaggtacatggagacagatgcacacacaggtctgtgcacacacatacatacgcatgcacaggcacctgtgtacacacacgcagatacacccacagcataccatctgtgacacacacagacgtaggtacatggagacagatgcacacacatgtctgtgcacacacatacatacgcatgcacaggcacgtgtgtacacacatgcagatacacccacagcatgccatctgtgacacacacagacgtaggtacatggagacacatgcacacacaggtctgtgcacacacatacgcatgcacaggcacctatgtacacacatgcagatacacccacagcatcccatctgtgccacacacagacataggtacatgaagacagatgcacacacaggtctatgcacacacgtatgcatgcacaggcacctgtgtacacacatgcagatgcacccacagtatcccatctgtgccacacacagacatacgtacatggagacagatgcacatacaggtctatgcacacatgtacacatgcacaggcacctgtgtacacacatgcagatgcacccgcagtatcccatctgtgccatacacagacatacgtacatggagacagatgcacatacaggtctatgcacacatgtacacatgcacaggcacctgtgcacacatatgcagatgcacccgcagtatcccatctgtgccacacacagacatacgtacatggagacagatgtacacacaggtctatgcacacatgtacacatgcacaggcacctgtgtacacacatgcagatgcacccgcagtatcccatctgtgccacacacagacatacgtacatggagacagatgcacacacaggtctatgcacacatgtacacatgcacaggcacctgtgcacacatatgcagatgcacccgcagtatcgcatctgtgccacacagacatacgtacatggagacagatgtacatacaggtctatgcacacatgtacacatgcacaggcacctgtgcacacatacatacagatgcacccgcaacatcccgtctgtgctgccctattaggtttgtggccatttggggaatcttcctaaaaccctaaaagctagggcaggtctgcttgagcaggagcagcagggtctgggggacccctgagggcaggacagtcagggacccacagttgagctgggcccgctgagccctggatccttcttggtgtcttatcctggccagcaagcaagtgtgagctcctgtgggtctccagaggcccatgaggaccagtgggccagttgggaacaaggcttggcgtcctcttcaggggggaacaccagggcaggcctgaggaggcctgtgtccccagcctgtcattgctgtggctccgcttctcagggagcctaggaagaaggtgtggcaagagcccgaggcgctggctgcacctggcggggcctgtgggcgtcagtttagacccatccattctcactgcagcattccagggtttgcccttatgctcggctgtgtgagggtgaggatgatgctgtgggggcatgcatgctgggtgtgtttcagccttctcttccaccaggcatcctgacatcgaggcccaggagagaggagtccggtgtctacttgagaaacagctccccaatggcgactggccgcaggtatgccgccagggacctgagcgcacaaggcccagcactgacctccagcgtgcatggctgtttccacgtccccctgctctgtgtcctttttggggtactttggacacttgggaggcgtcacctctgccagtgaatgccacagttggtggcaggtctgtggcaggtggtcgggtcctaaagtccagatcttgctgttgtttcaagtgatgctctgggtgggggaggagctggatgggagaagccagtgggcgggaagcctttttgctgcaggacagaccctcccactccagatgacctagtggcccctcactgagccagaagtccctgtggtgtgggtgtcatgaggtcatgtgaggccaaccgccctcccctgggatgaggctgagttggtggaagctgatgtggttgtgaggggctggtgaccctggcttagggtttgctgcagggcggggagtctgagctgggctgatggtgccatgactgatgcgggatggactacttgctttcctatgctcttgcttaattagccctttccaggctgactcacccacaagccagccaagccaacagccagggctccagttcagggactagccctcagctgactggtgaagcctttgtgtttatttctctgtgttcttttaggaaaacattgctggggtcttcaacaagtcctgtgccatctcctacacgagctacaggaacatcttccccatctgggccctcggccgcttctcccagctgtaccctgagagagcccttgctggccacccctgagaacatgcctacctgctgggtgccgtctgtgcgttccagtgaggccaaggggtcctggccgggttggggagccctcccataaccctgtcttgggctccaacccctcaacctctatctcatagatgtgaatctgggggccaggctggaggcagggatggggacagggtgggtggcttagactcttgatttttactgtaggttcatttctgaaagtagcttgtcgggcttgggtgaggaagggggcacaggagccgtgacccctgaggaggcacagcgccttctgccacctctgggcacggcctcaaggtagtgaggctaggaggttttttctgaccaatagctgagttcttgggagaggagcagctgtgcctgtgtgattccttagtgtcgagtgggctctgggctggggtcggccctgggcaggcttctcctgcaccttttgtctgctgggctgagggacacgagggcaaccctgtgacaatggcaggtagtgtgcatccgtgaatagcccagtgcgggggttgctcatggagcatcctgaggccgtgcagcagggagccccatgcccctgggtcgtgagcttgcctgcgtatggggtggtgtcatggagcctcatgcccctgggtcgtgagctcgcctgagtatggggtggtgtcatggagccgcatacccctgggttgtgagctcgcctgcatatgcagggtctgtcatggaacatcccaagtctgtgcagcagggagccccatgcccctgggacatgaacccacctgcgtggaatgctgtttgtgaggtgtctacagggtttatagtagtcttgtggacacagaaatgcacaggggacacttacggacacagaaatgcacaggggaggccgagcataaccaggggtgaggggcaggcagcagttgtagttactgccgcggggcactgctatgtgcagggacagccagcacccagcccatcaccactccctgggctggctggcaggtatggcaccctgggagcccggcatatacccagggcacccctacggctgccgccagtctcatgcccaggtgggtgctctgggctggagcgagggccaggttttgggccgaggcttccccaggcaatcctgtgagctcccttctagcctctgacccagtctggtctggcttgcatggatgtagggcttggggtgggaagttcaggtcctggctttgcctttgcctgatgtggatgagcagctcacatgctcagggccacctgagactgtcactgctctcccctggctactgggaggagtcactgagagcttcgttacccctgctgccttgcccagggcacaccctatacctccttatctgctcttcccctccctgccgccttctgggcaggtagcagtccctggcctctccccctggctgatcactctccctcaggcagtggagatctgcgtctggacaccctcagatcctgtcattgcctgcccagagtccttcaggggcacccctctgccttggtgtgcagtccagggctctcacccaggtgccgcaccctctggggtcttctgtccagctcccttgccccatgtgctgtcactgactctccttgggactcgcctgcctgctcagagccctgcagggcttggtcagctgcctgttcagtgtcaacacttccctgcacatcttaaaactgggctttattttcgctgaaggaactgtgttgggacccttgacatctgtcaggtttgcacatgctgtttttttttctcagcccacgtgttctcccccacgtggggtagcagcaggacagacagtgaatcacagagtctgccctgagcagaggctgctgtccctgggactcctagccatggtcagactgtacaaaacggttttccagaaatgaaatgtaaatccatttttatactgaaaatgttactgaaagtcacttttatgagcatctgccttaataaacagacattgattcccttatcagaagcctgtcacactgtgtttcgtttcatcctggggagaactgcagatttggggtttctggctgtcatacgtcacctgcctgtggggcgagtgggaggcccagcctggtttagggaacaagagtgacgtgaggagtagcagggtgcgtctccagttacctgagggaaaacagatattttaagagataatagcatagcctattttaatatgttttaaaggccataagcatatccaggaagataaataaacgtgatacaatgtccacataggaggaactttctttcactgcattgttttccttcacagtggccttcaagtcacaggacgcagcgattccctgccctcttcggtgttattacacaggcaggacttcagtgtcagtatccctgccttcagtcttctttagaaatcacatctgtgttcaatccattgtttagagggagtgtatttttcctgttccacgaagaggactttttgttcacaattggatcacaatgcagaggagtctgttcctcccccgtcggcttctcggtgctgggagggtgacctgtcccagatgactcatcaccctgacatgctcttgacaaaggacaccaccaagaggagatggcagctgtaccggtgcagcctctgtctgagggggatatttgcctcagtgtgattaaaaatcagtcatgaaagatttttgaattcagattatttttatcaggaacagattttgaacatcctgaaatcttttccctggcatcatattaggttttctttgttcactatgatgtaaagtttcagactcttgatatttttaatatcaacatagacggtaggacaaggaacggtaccagaaatgagtaaagagacaataatgataagatcgatttatcaagacataacaaccccaaatgtatatgcactaaataacagcttcaaaatacatgaagcaaaatggcagaattgaagagaatgagataaaaacagaattttaacggg

SEQ ID NO: 126 - DNA, 24893 bp, Homo sapiens
ctagaggttcgggccgagaagaggagcgaaagcacagagccgacttcccctcacccatctgggaaatgggctcgggccaactgctgacttcgcgctcgctggcgcagctccctgcggagacctcggcggggagggaggctgaacatctggatgacatttctgcgagagcggctccggagcggcggtcggggagggagaggtgcgctcgtgcgcacgtcgggccgggagggaggcgattcctcggggcctgggtcttgtttttctcgctctctaccgcagccccttctcccgcccctcagcccccaccccgcagcccccagcccccgagcctccccggctcccgaccagccgagctccttcactggcggcctcgcctcgccagagggcaccctcgatcttccggaaaacgccaccatttttcactgcccctggagcgtctccaggcttctgcccgcctcccgactccgatcttgtcaatgaagaatcgggccaggatcgccgcggagcggacgccgaccctccgacccggctcgcaggctgggagtcccctctgcgaggctggcatggccgcccctaccgggtcccgcgccctctgcggaccctgccccgggttgggcctggcccgcgggcggccccgggaccgggggaccaggagggagagtagacgcgggccgcggacggcgcggactgacagctggcgagagggcgccggggctgggggaaagggagggagggggctcatcggagtaactttccagaaaaacagccaacgtgtggcaggagtgattccaagaggggaaaaaaagttcagctaccacgtcgaacgagaggactcgcaaagtatttttcaaaagggctcggcttttcctgtgcctgtttaaaacattaacatcgtgcagcaaaagaggctgcgtgcgctggtccctccctcccccaccccaggccagagacgtcatgggagggaggtataaaatttcagcagagagaaatagagaaagcagtgtgtgtgcatgtgtgtgtgtgtgagagagagagggagaggagcgagagggagagggagagggagagagagaaagggagggaagcagagagtcaagtccaagggaatgagcgagagaggcagagacaggggaagaggcgtgcgagagaaggaataacagctttccggagcaggcgtgccgtgaactggcttctattttattttatttttttctcctttttattttttaaagagaagcaggggacagaagcaatggccgaggcagaagacaagccgaggtgctggtgaccctgggcgtctgagtggatgattggggctgctgcgctcagaggcctgcctccctgccttccaatgcatataaccccacaccccagccaatgaagacgagaggcagcgtgaacaaagtcatttagaaagcccccgaggaagtgtaaacaaaagagaaagcatgaatggagtgcctgagagacaagtgtgtcctgtactgcccccacctttagctgggccagcaactgcccggccctgcttctccccacctactcactggtgatctttttttttttacttttttttcccttttcttttccattctcttttcttattttctttcaaggcaaggcaaggattttgattttgggacccagccatggtccttctgcttcttctttaaaatacccactttctccccatcgccaagcggcgtttggcaatatcagatatccactctatttatttttacctaaggaaaaactccagctcccttcccactcccagctgccttgccacccctcccagccctctgcttgccctccacctggcctgctgggagtcagagcccagcaaaacctgtttagacacatggacaagaatcccagcgctacaaggcacacagtccgcttcttcgtcctcagggttgccagcgcttcctggaagtcctgaagctctcgcagtgcagtgagttcatgcaccttcttgccaagcctcagtctttgggatctggggaggccgcctggttttcctccctccttctgcacgtctgctggggtctcttcctctccaggccttgccgtccccctggcctctcttcccagctcacacatgaagatgcacttgcaaagggctctggtggtcctggccctgctgaactttgccacggtcagcctctctctgtccacttgcaccaccttggacttcggccacatcaagaagaagagggtggaagccattaggggacagatcttgagcaagctcaggctcaccagcccccctgagccaacggtgatgacccacgtcccctatcaggtcctggccctttacaacagcacccgggagctgctggaggagatgcatggggagagggaggaaggctgcacccaggaaaacaccgagtcggaatactatgccaaagaaatccataaattcgacatgatccaggggctggcggagcacagtaagtccaaattctcgctggggtgtctgctctggagggtctgaactggagctgggagctctgcagaggggggcctagtgctggccacacagcagggtgccccaggattcaccagcaccaaggctcaggatgtgcgatgctcctccgttggggctggggaggtgggtggggaaggagatagagccattctgttaagagccggcgcttctgggaggccaggagccctggagctgagtggcttgctgaattcacatcacatccttgactgattttaatttggaattacattgtgctgtccagggaaacatatgtattcttgcacatgcgatcgtatcagtaactgtaagcatctgggtgccataaaggggaaggccggctctgtcaggagcccttacggttctcagtgtggagacctcatcttctccctgcttttcacaactcattgtgacacgtctccgtttcagtttttccagttcttgggaagaagaatacctgccccaaattaatgtctgtcaagctttttgaagcccaggcaggagacagcttcttgctgcctgggccctttggtctaccccacccacgtgacccacgagacccacgtgagctgtgtgtgtggaaggaagagggtatgcacgaatgttcccagggccgtgtactttagggtgacatgcagtcttgtgcagtagacagattcatgtgctcaaaatgggcgccctccaggccggtgggcacggggagagcgggttttggctgtggatgcgtagaggaggctggcgccctttgtgtctgcgtgtcacgggagagcgggtggaggggtggcagtgggtgcatggtgggggggggggatatgtctgggagcctgccgtcccaggaggctctgtctgcatggaggagccgggcggcttctgggcgagatgtctgtgtgtgttggtacacgtgtggaagtcatatgtgtttactgaaggggattttaaaaacctcaatacaagagagagaaatttggcagatgttgagaaactgacagcccaggaaagaggaatgtgagccactcgtgggccgtagactccgggagcagctctgtttgcttttcctaccagcaggtgtcctcgccgccctgactacctcagcccaggcccacctgggaggtgggcagctcctggagtggggtggagggcatgggatggagctggcaggcaggggagggtggtcagcagagcacacagcaaggggtgaaaggaacctggctggagagaaggaacaggagtgggtaccgatgggtggaccagctctggctggaggtgcaaaggccccgttcacggctccacgccaggcagaggagcctgtggttactggcgaggggttcccgctccagcttcctgtggctgcctggagcgcctttcttcaggatgtggctgccatgtggggcggaggctggaggccgatgcagagctactactccctgcccagggtctctgggtggggctggctcagagacccacagttcccagaggcacctagcagctcgatggccaaggctccaactccctgggaacccaccaacgcgggagatagtgaccacaagcatcagaggaaggtcgaaatctgaggccggcaggagaggtgtgaggagagtccagggcaagagggcaggactcagaccttcatggtctgggtcagcaggaggagtccaagggaggaagcattctgagtcaccaggacccccccatcccggaatcctgagctgagaatgaatgagccacgtggaggcaaggccatgcaggtgcaagtggacactgattttgtgcagactcaaagcacaaatagcagatgtccttgggaaaagcccgggcagggccccatagatgctgggcagcttccaggctgcagtaccaagaccttacaactgcaacagatgggtggatgtggggttatggagcaatggtctggcctggggcaacccagcacagtgagcaggatgctgttcaggatgctggggaggagccaacgtgcgatgctatgaggctcacaggtacaaaccggaagcaggcagactctgcagctgttggaggtgacttggaggctgagcagacggacctgggcccgccctgcagctggtcgggtgctgagcccaccccagagaggcagacacacaaggcacactaactataaagaaggcagtgggcaggtgctgagcaggagcagagagccatcatcaggggcttgcaaggcggcggggcggggtgggggaaggaagcctgtctttaactcatgagggcagacaggggtgacaccaggtctgtggtggggcacagcagggtctcaatgccagagcctctgctgggaggtcatgagatcacgttctgttccatatttcctcacttctggccacttccctgacccagtgaacatgcattcaaaggaaagtgacagtaggagccagggcaaggagatagaggtccctggagaggaaaatgaaagaggaaatactttttagtagtgcaggagaaagggcaccaaggtgagagcagagaggaaggccttttcctaaataaccttttctccctgttttacagataaggaaactgagacctggattgcttaagtaatttgtccaaaaagagcagggaccctaacctagacattctgtgtgcaggacgcatgtagttaagcactcatttatatgtaaaatacacgttgtaagtgttacctttaacctcctttaacctttagggttcagtagaactttgatttataacataaatgaatcatgtgttggaccaagcaggagaggtcagagttattatcttagtaacccaggtggcagattgcacaatgataactggatttgttcttccttagctctgcatttttttttttttttttttgcccgggagattcatactgccacaaatgttctccctaatttaatgaaggagttttctttatttaatgaagagtctcaagcaggttaagcaaccgcagctacgtaaaagtgacctctctgagcctcagtttccccagctgtaaagttagagatgatttccaaactccttttcagctgaaagaattttataattccatctgggatgaatcagcagagcctctattggggagtatgggcaagactctgtaatcctttttctaattctccaggattttactgtcgggagggagtagagagtttctctgaccccatgtgatgggaaaggacacagcttttttacttccgttgtcatccctcttacaaaggtatcaccaatgtaggtgtcattttatcttctggcttgtaattatctgtctctgttcggagacttgttgttttcagccaagggcagcgctaagacaaccagcaaacccagagtttctcagcaaagagaaaactctatattttagtctttgttctctagctgctaagtgtagattttgtttattctgagaattattctgaaaatcatttgctccaagggccaatgccctctgcacagtagaggtcagcacttctccaagtgtggtccagaggaagctggaggtaaatgtagattccctggtcccacccacccttatagaatcagaatcttgagggggtggagtcttggggaacctgtattttcgacaagctccttatggattcttaagcacattgaagcttaagagtcagtgaactagggcgaaacttttcttagagggatggcaaacacaagtgcctacagagacccggcaggaaatgcaaatgatctggaagaaaagccacggcgtcatgataaactgcaccaggacacttggtcttggggtcaagaagaaagtagggtgtgtgagacagggagagggaggggacctggagcccacgtgcccagccaaagcagcagccagcctcagttcttgctgggttttgcattgaggactgtgggtccagcttgattagttcttcccgtgtcccagaaaagcagaaaatctggatctttctgtgaagtgttccaatttttaacatgggcttaaaatgtttatgggcttctaactcaaaatttttaaaggtgttccatcagcgaaacaacatgtctaattcatttaacggttaatcaatagaaagctcacaccattaaagcagtggtttctcaaacttccagaacatctagaagccatggtgccctttgcaacacattataatctgtggttctcaaccctggctgcacgttagaatcatctggagatcttgaaaaaaatatgccgtggaccccactcactccagtgtagtcagaactgctggggaatgggtccaggaatcatttgtttttaaagctttccaggtgattctaatgtgcagccagggtagagaagtacagccacactgataaatatagtcccttcactagaaccagcagaaatgatatatacaagcaaaggcacacctagccacccaggtgtctgaacacattttaaaaggcagttaactaaacatggtcagctatttcctggtttttccatgcatactgtacatgaatattctttgcttatgttttgccccgttaaacaaaatagagaaaatggcattcaccaatatatattttttctgtgcaatggaaaaagttgctcaagatttaatttgtaaaggtgggaccccctagtccagctctcaataatactagtgttctgtgaggcatggcttaagaaccacaaactcgtttgcagtgggtcattgtctgaggcataggttgacactctaggcccatttagtggaatcttgccatattttgttgatgaaaccatcttcaccagatgatctcccagatccctcccagcttgaagagtctctgcttcaataaatgaggtatgttcagaagacctgggttcaaaccccacctccaccaccttctagttatgtgaccttgggaaagacatttaactttttgaggctcagttttctcatttgtcaagtgataaattttacatgttttcattcttctcaggggttgttagaaggtcacatgaagtaataaaaactcgacaaaacaaggtggtgctattacattttgcttatttatgtatacgatgattcattccacagattacttaaaacatcattattcagtgaatttgattgtcaagaagattgtatgtacattttctttgatctcccaggcaattcttttttttaattaattttaattttaatttttttgacagagtctcactctgtcacccagcctggagtgcactggtgcaatctcggctcactgtagcttctgccttctgggttcaagtgattctcatgcctcagcctcccgagtagctggggttacaggtgcccaccaccacacccagctaatttttgtatttggagtagagatggggttttgccatgttggccaggctggtctcgaactcctgacctccagtgatccacctgcctcggcctcccaaagtgctgggattacaggcatgagccactgttctcggcctttaaaatttttaattttaaataatagggataggtcctccctatgttgtccaggctgatcttgaactcctgggctcaagcaatcctcccgcctcagcctcccgagtagctgaaataacagacatgtgctaccatgcccagctaattttcgtattttttatagagatggggtttcaccatgttggccaggctggtctcaaacacctgagctcaagcaatccacccacctcagcctcccaaggtgctggctgggattacaggcgtgagccaccatgcctggctgccaattcttcttcttcttcttctttttttttttttttttgagatggagtctcactctgttgcccaggctggagtgcagtgacacaatctcagctcactgcaacctcgacctcccaggttcaagtgactctcctgcctcagcctcctgaatagctaggattacaagcatgcaccatcatgcctggctaatttttgtatttttagtagagacggggtttcaccttgttgcccaggtgccaattcttttttaatcactagcaattgtgtcctaagctttgcttgctagtgtcaagttgcttgtgtcagctaacttctgagtgactctggccaagaccctctagacagccatttcttcctctgaagagggttgcgccacatgactcctgatgtcccttctaatcatgggaaatctatatatcccagtaatagaaaaatgacctttcccacctctttcttgaaaccttaaaattctccccaggatgtgttcatcctggggagcagattatgattgataggctggaagaaaccaaagaggacggccactagggtgtcctgagaactctcttagctcataactttccccatctcctggcttcccactgccttgacccactctgactgtctcaccagcaagtgccattttccatctcccttcttttttttctgagatggagtctcactctgttgcccaggttggagtgcaatggcaccacctcagctcattgcaacctctgcctcctgggttcaagcgattctcctgcctcaacctcctcagtagctgggattacaggcacgcaccaccaggcctggctaattttcatatttttagtagagacagggtttcaccatgttggtcaggctggtctcaaactcctgatgtcgtgatctgcccacctcggcttcccgaagtgctgggattacaggcgtgagccaccgtgcccggccccatctcccttctttttacagcaaggtgcatgttgcactgacttaccctttattcctcttgtagtcactggagctgtgttatttatttactttattaatttatttatttacttgaaacagagtctccctctgttgcccaggctggagtgcagtggcacaatcctggctcactgcaatctggacctcccgagctcaagtgatcctcccagcaggtgctattgtaactgaagccatatcaataacagctccttcaaaacccagctctgttgtccttgatagggttgccaatgcaagtagcttatccacattcagagtattacaaacttgtaaacttacacattacttaactatcactgatttctctccttggttctatctgaaatggtttagggaatcgttggcagtatctgttctttcaaagccaattattaatcagggcttcattagacagcattcacacatttgttttcctaacatctgttccattaattttctaagaaccagcgtcaggcccaccagatggcaatttccagaaacactcactcatcctttcctgaagatcagtagcgcatttgcttgtttccaggcctctgatccttcctgccttgtctgtgacttcctcaacaacccctcggggtgattataagctcattccagccatgtccattatgtgtggaatctgggtctatgagcttgaatttcaacttcgggctattgttaccatttgtgcagaaagtttttctctgggtgttaatactgctcagaccttgaggctgtcaagtgtacaggagcagagaaaagacaggctctttctctttctctggctcagaggggtgggaaagagcattcgctgcccacatcttgtggacagggatgaagaggccagcaggtgacagcgtctggcatagcacgtgctgtcaaggaaagagaaaggagccaatggtgacacaccagcttggtcagaggaagcatctgtgtttctgccaggctcatgatgtgggctctttgctatataagccctgctttattgggtctaaaacacaaggttgagatgtcactgcactgctcaaacactttcagtgactccctactgttaatgggttaaaatttaaccttttagtctgacaggtggaccccaatctatcatcttgccctttctcacctggctcccacctgctgtttcgggcccctcttactcatttgcatttcctcccctccctgcctttgcttccagcagtcactccatgtaacatttctttcctccccatcctcaaatcctctcaattttcaccccttccgtgaagtgctccttgccatttccctcctttgatttcctgcagcaactcctggacttctctgaaaaccactggtttcctgtcgctcccctcacctgtgctcctgcattgtgacatcttccggggcactctgtcctattatttctctctagtcctgttatttgggcccatgtattaatacccccccttagatattaacccataagcctgaggctgcacttttttgaattttgaaatcagaccttggccttgaccttgagcagcaggatataaataactcttacatgcttagcgttccaataatggaacaccaggcataaatgggttttaatccccttgaaggcaggggttgtgtctactcatgttttgcttcccaaggttagcactatgcttggcatatagtagctgctcaatacatctttgataaatgaatgaatgcccagatgaacaaacacacgaataaatcaactagctgtaagatatgtaaactactaggtgctgatatctttctagaatcagtattttctcaaaaagtaggaaaaacgggttggaaaacttaccagaactgagatgtcaaggcagtgggaggagggggcaattagatttgactggccagtctagtgccatgttgtggagctctgaggccacactgctccttgctcaggactgtgtgtgattctagggccaccaagaatcttcctcgtatctccaccttgcggtctgaggcctcaagcctctagggaggtggcaggcgggacggtggccacttggtgcctgtccgttggcagcacactgttcctgcatgtctcgctcatgctgtgccctctgctctgctttatctcctagacgaactggctgtctgccctaaaggaattacctccaaggttttccgcttcaatgtgtcctcagtggagaaaaatagaaccaacctattccgagcagaattccgggtcttgcgggtgcccaaccccagctctaagcggaatgagcagaggatcgagctcttccaggtaactcctctctcagagcagaaaccacaccgacgggaaagctggttcctttgccatatcagggcaccactgggtgcagcgtttggcagacctgggtttgaatcctggcttctctgagccttcgtttccgtatctgtgtctgtcattaaaacacttaagagttagctaaggtgctcgagggccatggcattcaggaaccactggtttcctatcgctccctcacctgtgctctgcattgtgacatcttctggggcactctgtcctggtctcgggtactcactcctttctctgccctgtagatccttcggccagatgagcacattgccaaacagcgctatatcggtggcaagaatctgcccacacggggcactgccgagtggctgtcctttgatgtcactgacactgtgcgtgagtggctgttgagaagaggtaggtggacccttcagataagcatttcagaatgaacctcaggtcccttagtcctccatgaaatggagggaagaggacagaattaagggagtcagagatctgggttcaaaccctagctttgccactgagtatcctccattcattcactcaactaatgtttattaaatgctcactgtaagacaggccctggggatgcagccacagggataggaactatgagaaatagaaagagggcaatgtgacaatgagtgggtggagtccaacagggaaggtctctatgatgaagaaattcatgcattgacatctgaatgataaggatttagcccatgaagatcagaataagggatgtgctaagcaaaggcaacagggaggcccaggccctcaagtggaaataagcttgatttgttctagcagcagcagcaaacagatcggtgtggctggagcatggtgagctggggaggggaagaggaggggaggtggtcagggaggttgctggggccatataatttattattactattattattattattattattattattattattattattattatttcttgagactgagtctcgctctgttgcctaagctggagtgcagtggtgcgatctctgctcactgcacctccaccatctgggttcaagcgattctcacgtctcagtctcctgaatagctgggactacaggtgcacgctgccacacctggctaatttttttgtatttttagtaaagatggggtttcaccatgttggccaggctggtctcgaactcctgacctcaagtgatccgcccactttggcttccaaaagtgctgggattatagatgtgagccagcatgcccagccaatttaatttagaacatcatcaggtcatggcgaggtttcaggacttattccaggtgtgatgagaagtgtgggagtgctataaccagagctggggatactcaagatacccaggaattccttcctgtccctctactgggtgtgaagtcaagagcctaggagaacccacgtggatctgccaacggcagctctgttgggaattctgactcagacagctacagggaggaggggctgggtgaggtgatttgattgacatctttaaaagatccctctagtttccaggaggtcaagggaagaggcaggaaaatgagttaggagccacggcggcagcccagatgagagcaatatctaggccgagactagggcggtagcagtggatatgacgatcagatggatttgttctgtattttgaaggtagccagtagcacaggctgattaggtatgggatgtgaggacacaagagcattccagataacttctaaattttttcgacatccaggtggtatcacttattgaaatagggggcctaggagaagaacaggttctgttctgcccagttaagtttaaaaggccgggtcgtcatgcaagtagagctatcctggaggcatatcaaacttcacatgtcccaaatatcttacccacacactgccttcacctggaaaatcaggcaatggttcctcctctatgtatgcctcacagagctgttttaaggatcaaatgtatttgagagaacttcatggtttttaccatgttttacaagagtaagcttttcttattttagataaggaaacaggccgagagaagttaagtgacttgaccgaggtcgtccagtctggattagaactttggtgtctcatgacaccatcctctgtgtttctttcccttttcttggctggtactgcctggtctgatgctcagtgggttggggtcacagatggcagtcccatctgttccttctcttcctcttgggcaaggttttctcctgtcatcagctgctataaagccacagaccatccacatattgatgcccagagtccctgaggcaggtggatccttctaagtccttggtgttttaggcaactaagagttaaagctcaaaggcagagcttacaaactatttggcctgcacattgttttcgatttgactagtcatcaacagttttgggtgttttaagtcaggagatttcacataaaacctggacttcttgctgtttttgaaaaatcgaaagatttcctgataaccatccgtcagagatgagtaccggccaccccttgagatggggtatgcatcctcagtccccgcagcccccaccattccctattgttccccaagagtgaggctggcagttcctgtttagcatcatgtgctggctcgattttctcacttacgtgacctgcctgggctcggtagccatcgagtttgcattgcttgatgccacggagcccaggcaagtcacataaatgagaaaattccccatccaaggggaattatccagtggctgagttggcagatggtgggctgaagatcctgccccagtcccaagggtacccaggaatttcatcctgtccctcctactgagcatgaaggcaagagcctaggagaacccacgtggatctgccgacagcagctctgttgggaattctgactcagacggctacagaaaggaggggctggggaaattaatctcttaacttccctgtctgattttgatcagctccacctggatttctttgaagccctgggcacttgaaggagttcttattttcacagctgcagaactcaatgagaagtttgcattgagaatgatttccatcctcctgagacatcaaaaagataatttcgtaataaaacctatgggtcccccacccaccacccccacagctgccaattctgaggttagttcttcattggaaccttcagttcacacttaggcagatactgcccacctttcccacaggggaatcatcacacaggtttgtacttacagagagcccatgagtctcttcagagttcatggcttcaaaccaggcaacaaaggactccaaattggagcagttggcggtgtagattgatgagaaaactgagtcacacatgtggtcttggattcattcagcaaacatctgagagcccttgtgcaccaggtacccaggctgcattctgggtcgcagagtgggttggagtccacaagggccgctggggacccaggtctcatacccttgtgctattgctcatatagtctgcagcacctagctaggcagggccaggcctcccctagtaggctggggagggagcctctcagcatcatggctcaggaaaggtgggacactgggaaacaaccatcttgcatgttggtgaatgtgtgggcatcttccttggtggtctctgttgccccctctttacccctccttgtctctaacaagagtttgggatctggcatcaagctgtcagtgcttgaatcctggcactactatccactggttggatatcttgggcaagctgtttaatctccctaagcctcagtgttcttatctgtacaatgggggataatagttcttgctctatgggattattatagagatagaataagttagtgattgttgtcatcatctctaagtcctctatctggatacagcctgttggccaagccaggccaccctcttgtgcttacatcctggaccctcactctccccaacacagctgtctgcaccttgactttctaactcacagaatcatggaactcactcactccaggtctcttccagcctgccttgaaccagcttgaccaggaggtacactgtgttgttaggtagcccatttcagctactttggctcctccttccagctgccttaacccagggagagggcaatcctcatacctccctctccattcacttctcctccagctgggtctcagctgccttgttttattggtctgccttccctcactgagcgaacctgctggaacagagatcttcaagctcagcaggcgcagtgtgcctcagaggttgccctgacttagggtagagcagatctggttaggctctggagtttatggaagaaaggagctgggttttaaccagtaggactgggatgtccaagccaacctaatgttgatgggaatctccagtcttgtaggcttgtatccttctgtctatgagaaggttgctgggccaggttggactttttggggtttgccctgatggcacaatttcaggaagactccaggttgtctccaaggccagatgctcacacacatggtgtgtggcctcagggagcagcaaatcaatcaactcatcgagaggctgaccctgaatccagagaggtccatcccccatgacctctcctacacctggccacaactggctgctatcccaggatcaacagagcttcccaaattaagtcttacccaccagaattgacatgataccagatcctacctggttttctgtgtaaaactacttgtctcagtgcagacttttcattttctttctttttccttcacttcactcaacctcatttactgagttcctgcttccttgattttggttgccaaaacatgtgatcccacaactactaggcgaatgggctggagttgcccttcacgcaccagaatgtcaggcaccaaaccctggcacctccaggcttcatcatgctcactgtctccgtgctcaagtcatctggaccctcagccatagttctctatcatctcctctgtgctgttttctaagttcacaactgtcttcccaagctgttcatcttggtgagcaatccacattccaacttcccatcatggtgaacaaggattcccaaagaagaaatgtccaagtaatttttacctcgttgtgtccttgttccttaggaaaaatatggcccagtgtaaccgtgatcttcatcttatctcttctagaatctgccactttgtctaggcccacagtcatggccctggtagaaatgcttgcatcttccactgagacggattctgcttcctgtttgcaagtgaccttgcctctagcattggttcctgacttgaatctttttgccagcattacatcctgtggctttttgaatttgtggccttttgaatcacagtctctgtgctcggagactctttagttactccctgtccgtagtctcttccagtccctctgcctcttgccctgatccttctgcagtagattggctcaacgatcccctctcccaaaaaccatgtagatggcatgagtttttgctttccttactgtatctgtgtacttttgcctccaagtaggtaggtgacaattttctcttaataccatcctttcaaagggaatgattattccacttctgtttcatgatggccactagtgtatgcccccatttggtgattcataatacaacaggaatacctggaatgtggcaacgtgcgcttgaaggtccactctgagctctggaggcactttctgtctcctgtgaccctcaatagaactcagttcctatgagtccctataggagcagaggccctggctcacccttgcatgggtggtgggcacacttccccatcacacagaggtgcttttctcactaattctgtcttattttgcagagtccaacttaggtctagaaatcagcattcactgtccatgtcacacctttcagcccaatggagatatcctggaaaacattcacgaggtgatggaaatcaaattcaaaggtaacaaaatgaatgtgtatggtaggatgggtgagtgggggggaagttaatgggacaggatagtgcaggagacccttaccagacctcaagaaaagaaaccaagctccttcagagagatagccgactattttgtacttgagtaattctgctttgccccaaaagcaatgagtgtaactttcagtttatagcttagagaatgcattagcctctggaagacaacacgtactggtaagtggtgaaactgtgtaggcaagccatctagcctctggtcctagtgaaatgggatgagagttcctctttcacagtgttgtcaggcaattaaatgagataatgaataaggaacacagtgccagaaatgctcaacagataggacttgtcttcctcctccctaaaagaaattaagtttggctgtcctgaacatgagtgcccagacaactgagctttccagatgtgcagggcctacctgaccttgcccaggggtcctctgggtttggatgattgcttcgagcctcagggtgtttgtccccggggtgtttgggtagagatggcgaagtcgttgagagtcatttctggttttccattatgtttgcaaggaactcagccttgatgatctctggagttcagggaagttctcttttcctttcatattcccattttgggtaactgcggaacgcctgaggtcagaggcttgtctgggaaaaggtgcaggcctcttttggctcagcgctggacagtgatcttaccccacatgggctctattttacagccttttcttaaagccaaagatttgacactgtaaccacagaaccttagagcccagaggacctttggagtccttacctacaggccagcttaggatgaaaccttcccatttcagtgaatacttatcttgttcataaagattttcagaaaaagggatttgtgatccaggtctctcatttatcttacagatctggtgccccttcctgagacccgagccactcctgtagctatgtaaattaattcctcatgttcctgtcctcagtgaggatggacaacagttggcagctgtccttcgcaaaatcgatctccatttagttgagactctttctaagtcagtctccagtcttttccttttttttcagatgaaacgggttgatgaatttagattttctttccagagcttatttgctatttatcatatgcttcattatctcatctgaattttatagtgaaaacacttcaaagactctaagtgcaatgtgaatgttaacaattatacagtcttgtttctttggctcccattcaggctatcttaagttgtgacaccttaaatttttggtaggacttctgcgttatcttggtccattcacattttaagaggaaactcacaccccaagattctaagtctagaatctaaagtgacaatccagggctgggtgcagtggctcacacctgtaatcttagcactctgggaggccgaggtgggcggatcacttgaggtcaggagttcgagaccagcctggccaacatggtgaaaccctgtctctactaaaaatacaaaaatagctgggcatggtggcatgcacctgtaatcccagctacttgggaggctgaggcaggagaatctcttgaaccccggaggcagaggttgcagtgagccaagatggggccactgcactccagcctggccaacagagcgagactctgtctcaaaacaaacaaacaaacaaataaacaagccgacaacccggagatatgtgttaggtacccacttagtaacagggatgcttcataggtccatgaagattcctaggaatctcagcaagggctttctgccccttggaagatttctatacaagggtatggggatctgaacacggggcatctttcagtgggcatccttacaataataatgagttcttttgatactggcttctccatctgctcttcccctttctgcacctggacatcagaattaagctgcacttgtcccccacacctccctcgcagactgcactgcccctcctcctgggcagtgatggggcgtgtggaggaggcagcctccaagggctctgctctcttcagacaggagattgtcactttccttcccttcttcaggcgtggacaatgaggatgaccatggccgtggagatctggggcgcctcaagaagcagaaggatcaccacaaccctcatctaatcctcatgatgattcccccacaccggctcgacaacccgggccaggggggtcagaggaagaagcgggctttggacaccaattactgcttccggtgagactgggcccacatgggaaccaacatctactgcctgcctactgcccaatggctaggtcaggccccagagccaagccacactcaacagagggtccctgatgctattcacaaacatctccaggaagaagactgaaaatctctcacagagattttctctgtgaaatctctttctgttttcctgggagtcccactgtttttccataggctaactctggaaggagctggctgaagtaaatgaggaaaactctgtgaggaggagtgttgctaaaatagtttggattggagaggcttggtcaaagcctctccatgatttccatgttttaagcacttgtagagtgtatgtgtgagattaatgtaggagtttccattaaagaagtgctcagttagttccctatgaagggtccaaggatgctactggatggaggcaaatagaatggtctccatttgaacggaaagttggagctagagaaattaacaaatgaattcagaaattactgggtagccacaatagagagatagaaaagacccagcttctcttactcaggagcagtttcactgctcatttataaagggaggataaagtatgcatgccaactactaaaagggagaagatgatcacgcccatgagagggtccgaaggattaagtgctttaactgggagcaatgagttcacctatggacacaggaaaggcttcagaagggtgtggaatttgagcagaggcttcaaggatgaggtttggggatgaagggatccaggaggggaagcactgcaggtaaaggaaggagcatgagtgagtgagtccatctggcctcagaggatgccgaaatgaagctggggagaacgaattgggaaatatttagatctggaaaccatgtcttatgaggatggttgggcttgggaaactagggatgttcagttgggggaacagctcaacagcaaggtataggagaggcaaggtagttgccacaaaggctggcatgtagatttatttattccatcagttaggaacaaatcagttaggaacgaatcagttatcagttaggaacgaatcagttaggaacgaatgatcttggccagtgactttaatcatagtgatttcttgttcacaagaggcctgtagcagcagggttagggtgggctggctgcttaatgatgccaccgaagactcaggctttctctctttccagtctgccatgcttagtatgttggcttttcatccttttccttatggtcacaagtgattgctagggcttcaggcaccttgtccacatttaagacaagaaggaatgagggaaggggaagagccagaagctttcttcttccatctgtcacttttataaataatcgaatatctttgccagaacttgcccttaccccctgcatacttctccttgtctgatgggtcattactgggtcacatgaccaccgctactctcaagggaggacaggaaaaggagcatctggtgttttcgactctgtaatgggatgtcacaagggagaagggagttaggaatggttattgaatagataaccaatggtgtctgccatggttcacccttggaacccacaagaagccagattttggctaatagctgcctttggaagtagcaagttctaagtctcagcagatattaaagcagaggctagctgtccacttggcaagcggtattattgccaaatgatctctgtaggcaacagaattgaaggggcctgataatcacatttgggtgatctgttgaaccacggttctaatagaaggatatgccttatttggctaaatggcctttggattgagtctcagcagtcacctactatagtagtcaagctgcataaacttagaattgatttctgtctgggtgcacattaggagggtaaaaataaaaccaacctcaacaaagctgagttggctaataacattcagtgcttggttttatgtggagcgcttcatagcactgctttgtattgtgatagaaaagggtgcagggccacctttgcctctttactcttcctcatgcagcatttatctctgtttcttacatccttgggatcctggtctttaacacatgaatgtgcctttctggtttcttctgccccatgcccttgaacctgggattccattgatcagagccacctatgatggcatgaaaggactccaagggagaatatgagagcattcatgaagtttcttttattggtggttttaagttgattttctataaatgttttttgttgtagcaacttggaggagaactgctgtgtgcgccccctctacattgacttccgacaggatctgggctggaagtgggtccatgaacctaagggctactatgccaacttctgctcaggcccttgcccatacctccgcagtgcagacacaacccacagcacggtatggagcaggctcatgccatctgaggcactggggctgaccgaccagaccacttgttaaaaagaatgagtgaaggattgaatgttgagtgagcaaatgatggtctggggtgagtaaaattcctctggtgaaggttctgatcttggcaccctgactcagttctactcagtcacattctgcccttttaaattcctaccatagtttcaaccagctttttaatttgctttgtccaaagctctctgtaccgtagaaattaattaactgccacgtgttaccctatgtcagagatatgtgcatgtggctggcaaggaacactgaagtagaaaggcttctatcagaactctgatcattccagcctctcgaatgtagaaaacttactctgaaagacaacaacaaggatggacaagaagctaatttgaaatgctaggaacagaaagtgagatagccgagagtccacaacccctgaaactagtctgtctttcccttgaggggaatcaaaaatagggcagtaatttgtgaagcatgtttccttctagctcattgtttctgcatcctgtctggggccctgcacgctgcacttactaaatggctcaaggcaatgttttgtgagaacatttctcaccgaagtgatcagttccagctaggaagagcaatgtaagtgttttcttaaaagccaagataggccgggcacggtggctcacgcctgtaatcccagcactctgggaggccaaggcgggtggatcacaaggtcaggagttcgagaccagcctggccaacatggtgaaaccctgtctctaccaaaaatgtaaaaaattagccgggtgtggtggcacgcgcttgtaatcccagctacttgggaggctgaggcaggagaatcgcttgaacccaggaggcggaagttgcagtgagccaagattgcaccactgcacttcagcctgggtgaaagagtgagactctgactcaaaaaaaaaaaaaaaaaaaaaaaaaaaaagccaagataattcgttatcagtgtagtaactgtcatatgcttcaactcatcaccccaaacaagtgcagttgttctgcttctgtcattgtggatgaacagcaactacacaactactcactcacccaaaccaggttccaacagtttttttttttttcttttttttgagacagactcactctgtggctcaggctggagtgcggtggcactatttctgcttactgcaacctctgcttcctggattcaggtgatcctcccacctcagcctcccaagtagctgggattacaggcgcctgccaccacagccagctaatttttttgtatttttagtagagatggggtttcaccatgctggccaggctggtctcaaactcctgacctgaagtgatctgcctgcctctgcctcccaagtcctgggactacagctgtgagccactgcacccggcccccaacagttcctcttaaagagcacccgtggccattctagcacttgctcagcttctgggactgcccctggaactgggcgacttcctgggttccaggcctgagacttggccttccaacctctcactgacatgtcccttcccaggtgctgggactgtacaacactctgaaccctgaagcatctgcctcgccttgctgcgtgccccaggacctggagcccctgaccatcctgtactatgttgggaggacccccaaagtggagcagctctccaacatggtggtgaagtcttgtaaatgtagctgagaccccacgtgcgacagagagaggggagagagaaccaccactgcctgactgcccgctcctcgggaaacacacaagcaacaaacctcactgagaggcctggagcccacaaccttcggctccgggcaaatggctgagatggaggtttccttttggaacatttctttcttgctggctctgagaatcacggtggtaaagaaagtgtgggtttggttagaggaaggctgaactcttcagaacacacagactttctgtgacgcagacagaggggatggggatagaggaaagggatggtaagttgagatgttgtgtggcaatgggatttgggctaccctaaagggagaaggaagggcagagaatggctgggtcagggccagactggaagacacttcagatctgaggttggatttgctcattgctgtaccacatctgctctagggaatctggattatgttatacaaggcaagcattttttttttttttttaaagacaggttacgaagacaaagtcccagaattgtatctcatactgtctgggattaagggcaaatctattacttttgcaaactgtcctctacatcaattaacatcgtgggtcactacagggagaaaatccaggtcatgcagttcctggcccatcaactgtattgggccttttggatatgctgaacgcagaagaaagggtggaaatcaaccctctcctgtctgccctctgggtccctcctctcacctctccctcgatcatatttccccttggacacttggttagacgccttccaggtcaggatgcacatttctggattgtggttccatgcagccttggggcattatgggttcttcccccacttcccctccaagaccctgtgttcatttggtgttcctggaagcaggtgctacaacatgtgaggcattcggggaagctgcacatgtgccacacagtgacttggccccagacgcatagactgaggtataaagacaagtatgaatattactctcaaaatctttgtataaataaatatttttggggcatcctggatgatttcatcttctggaatattgtttctagaacagtaaaagccttattctaaggtg

SEQ ID NO: 127 - DNA, 8671 bp, Homo sapiens
actaagaatcgcagtatttaagaggtagcaggaatgggctgagagtggtgtttgctttctccaccagaagggcacactttcatctaatttggggtatcactgagctgaagacaaagagaagggggagaaaacctagcagaccaccatgtgctatgggaagtgtgcacgatgcatcggacattctctggtggggctcgccctcctgtgcatcgcggctaatattttgctttactttcccaatggggaaacaaagtatgcctccgaaaaccacctcagccgcttcgtgtggttcttttctggcatcgtaggaggtggcctgctggtaagtcattcaggattattactgaattctctcctgtttcctagatgttttcattatgtattttcatggaaagttttttgtaatgcatatttctaaatcaagtgacttttttgttgctgttcattcctttgaaagcagattatacaaaagcgagattggtacagtatagcgtagtaattttatgagatgttgttttacaaaatgctctttcaactaaaagtgaactgcctttttgctaaactctataggtaggaaacagatattcgcttttaaatcagatttgagagactatagagtttctactagaacgggcagtcatttaacatttgctctggggagccggaaggggttggctggttctctgcctaaatcaacagttttgaatccaaattctctgctgtttattttcagccatctgtgatagggaaaaataatgaattgtgagtgcattgctattttaaaagaactctaagctttctcctttatgtaaggctggggtgtggcgtctaggaaaaaccctacagttagcagcaggtcggtgtctgaagctaatagtggaatgtgttattttttccaagaattgtttttgattgaagtgagaggaatttccctgccaacctgggagctgaaagcattagcttcaaccacagcatggaaagaatgtgagcaaacttaagtttgctactttaaagtgctgggattaaaaattttaaggagaaattttatggaatggtaccatacgtgataaattttcttaatcaagtaaaagatagtaaaacatttaaacctaatacactgattatggcatggcaaatctgccctaaattatttatttaatgagattttatttaattttattttatttaatgagacggggtttcgccatgttgcccaggctggtcttgaactcatgggcccaagtgaccctcctaccttggcctcccaaagtgctgggattacaggcatgagccacagtgcccgtctgcctcaaatttaagcattattatcatgttaacatgattatttgtcttaaacataacatcacacttaagtttctttcgatcttgaacctgaagtatttcatatttactatattttaagagcttaatattgttaagttaaaactatgcatttgtataatcaaggaagcagttaatatttattatatatagctttcatgtctcccatttacaaaaaagtttcagttattctattaaagatttgttggtatattctgcattttacaagtggaaaaaatcagatttaaagaaagggtttaatatttccaaaacagagtttgttatctggggtcgtgtgataaactcttgtggaataaacacgtttacagtttattattttactcctcccatgttacatcctcaccctaaaaaatgctttgacagattacatgaaaacaagcagatatgacatttaaatggtctttttctcctcagaggtttacattctttgagatatctggtcaacctaatcaaagccagttaatgtcattggaaataaatatattttaccaagagatgcctaacctgacccatatgagcctgagcaagacaatgacctgactttgtttgtttcctaaccagatgctcctgccagcatttgtcttcattgggctggaacaggatgactgctgtggctgctgtggccatgaaaactgtggcaaacgatgtgcggtaggtcctcctgccctggtggtgaaaatgactcctaagatgtagctgtggcactctgtggctcacttcctgtgtgtctgcttttccctagatgctttcttctgtattggctgctctcattggaattgcaggatctggctactgtgtcattgtggcagcccttggcttagcagaaggaccactatgtcttgattccctcggccagtggaactacacctttgccagcactgagggccagtatgtaattactctctacatggctacacatttttatccaccacatgtatatagtggcagctctatcaaaccagataggcatccacttatccatccatccacccacctagccagtgtttattctcactgactcaggcatggtttaggcaataggtatccaaggatggatccccagtccccgacctaaacaaattctaaatgcttcttttcttttctttctttctttttttttcccccagagacagggtcttgatctgtcacccaggctagaatgcagtggcacaatcatagcttactgcagcctctaactcctgagctcaagcaataccccttcctcagcttcccaaatacagagtgcttttgaatagattcaataattcagtccttataataaccctatgaagtgacttcctattttaaagatgaggaaacaaaatcacagagagatggagtaattcatccaaggtcacgttgccagaaagtggcagttagcatttgaacccaggcagtctagatgtagagtttgtgttcatatagtgcatctcaattacttcatacattataccagaacaattgcctgattaagtgtaatacattttactactttataagaaagtattatagaatccatatataataagaatggcaactatatgaatttaacccaagcccagggcaaaccatgcccttacccctgtgtatacatgcactcatataaaacatacacatacatacactcatataaaacatacaaactatgtacaatgcccccttttttagttattaagctatataagtaaggcctattcacaatcataatatcaggataatttgtgctgttctaccattctatgttgatacttattttttttatcagttatccagaaaagaacagaaacagcacagctgatagaaacggatgtatgtggtgatgaatggatgacatgtttctttgagcaggagttgattctgagtttcccttttccctactcaactttctgaagttgaattttgaaaggtttagttttgagattcatgattaaaaataatattaataacaaattatattatcaagaatgtttgaccccatgaatttaaagcatgtagtgaggatatatgaatctcacaaatttagcacagttatgagatcatgaatttgaattagctgggttcaatcacagctctgcacctatctgtaggaaaaggtgaaatgagctctctgcatctcagttactccactggtaaaataaaatcaatggcaattgtcatgagaattaatgaaataatatgtaaaatgttccccacagaggctgccacattgtgtgcaactgccactgttagctgttaatattagctactaccttacaataaacataacccaatggtagcctttgaaggaaaattgatacttacagaagtttgaaattttggtgttcaaaactgtgatcaatcatgactcagcttttatcagaacatactggatgtactagtagaaaatggctattcacatatgtacaaacatacaaaactattgcacaaacagacttctaagaaaagtcatgacttatgcaaccagaatgcagggagaggtggtagtattgctaaatggtttttatagctatttgactgtttgcccctcccattatccactctggattctacaagaaaccttcctcctcttctatgtcattcttcatttaaaactgtccaaggatttcaatatgggaaataactaacagtcacaagccacaggttagttgcctgggagccaggtggagccaaaaatttttttttacattgagacctgaaaatatagatttttgttctgctgacatgcagaaagacagggccacaaaaacagaactttttttgaaatgaacaactataatctctgattggctcaatgaactattctaaagttaggtctcaaattccaagcccctttgttctgttgtggaaggaagtcgtgataagaaaagaattataccaggcctctttgtggaattaagtcaaaccttgattttcccacatgattgtattatattttgttaagaatccaaatactctgtagcaaaggctgaaattctaggagagctatcagaagtagaatttttcagactggaagaatatccaggtatttataaaatcgactaaatcctagaatctatagtcagatatcacctcagtatggtttgctgacatttcacaaagcaacttcatattgttatttatcattcaactgcttttaaaatgtgctgagtggctattgtgtgtcagatactgttctagcggctggatatacaatgatgaataggtctggctcctaccttcatggagctcagccttattgaatagatacataagcagctgttctccctggactaggttagatgcccttcctctgtggctcttccatattttgtttaccgatcagcatatctgttgcattgagattacttgtgacttgtctcttcctttagaagctatgctctttcaggacagagcccgtgccctgtgctccattatatccccagctctggctcagtgtcagactcacactgactgctcaataatctttgttgaatgagcaaatgcagtgtgctacatgctattatcaactcttgggcacagcatcatgaaagtgaagagctatcagccgggcgtggtggttcacgcctgtaatcccagcactttgggaggctgaggcaggagaatggcttgaacctgggacgtagaggttgcaatgagccaagattgcgccattgcactccagcctgggcaacagagtcagactccgtctcagaaaaaagtaaagagctatcaaattagttgggtttaatcccatgaatttgcttcctgttgcaaattaatttattccttaaaaacaaaaaatagctttgttccaaaggtctcagttgaaaaattccagcatattaaatatccaaacttgccagaatttggataattttcagcagtaacaaattgagatgtaataaaatgatctaaattaatattttaaagttcaaaaaaaaaactagcctaaagagattgtattttctaaatattcactcaatattgaatacaaatacccatcttttataccaataacaacaataaaattggaaaacagttttaaaaaacacctacacatactctactttagcacatgaattattttcatttttccgcatttgctcgtagtttacttcctacacatacatgaatcttacctagctttaaacacagcacaaatacagttctgcatttttatttttgtttataagaattcagatgcctgttagggaatataaatatcattataaggtgagaatttctgaccatgtaatcctagattggggtcaaaaattataaattataattttatgtttatcattacagtaggatctgggctaaattcctccattttgtggaatgacatgcagtggaagaaacttacacaggatattgaataattcattccttttttctgaatgaaaaaccaccaaacaaaagtagtttatgaagtatcccctcaagtatgaccgtgtgtcagaagtttctctttttacccacaggtaccttctggatacctccacatggtccgagtgcactgaacccaagcacattgtggaatggaatgtatctctgttttctatcctcttggctcttggtggaattgaattcatcttgtgtcttattcaagtaataaatggagtgcttggaggcatatgtggcttttgctgctctcaccaacaggtaagaacctgcatgaaaatgtcgtagtctggccctggtgttaatataccattgttttcatcataaagaaaaaggcaaaaccaaacatgctcgacctaccagcatttattctgatatcatctttgtagcaacacaattatagcattcactttagctgtcagtaacaagcttcctcgagtctcacagtcacaggattgtcttagttctttgcagttggctctatgtacacaagaacatgctgcccatagacacagcgctcccttcaggatctaattcactgcctctgctctcgctgcagagacagaaaaaaaagtgatgtctgctctttgtttgctgttatattcccaactagtatacataagtaatagccaaccattcaatgcatcaggcactatgctaaacccatatgactcaaatattaagcaataggcttaagatcacctactcaggaaataacaggcttcaaaccttgagtcgctctgtgcaaaagctcctacttttaacctgtattccacacttgctgtttggttggattttctgcaattccttcctaataaggagtcataaaaatgcctaagcagtaagtatggagaatcactagcaatctttgaacagcagctcatgaaaagcctttcgttgtgaaagaaaaccaggaagcacttgtttcctggggatatgatttaggagaaaaaaatgcatttgtttgtagcagtgaaagttcttgtttctatatcctcctaaaatatatatattattgaattaatgaaagtccagctttgatcctatctttgagagggttattttatgtcttatatttttcaaaccatttactcctctggtgccagatctgttaactttcttttaaaaataagacaaaaacctaatgaaaactgaaagcccattgctaccatgaaaaactttgctgaaaataaaaggaaactttctgtaattttgggggaaggttaaaatgaaaatctagttttccttatcaggcaagtatagcaagattaataatttctttggcaaatttccaagaaaataagggaatgggaaaccttcaatatggagcttctttcaagcagtacggttggggaagggcagagaagtatcctctagggattgctgtcatgcagcttacctttagccttgaatttcatacaaggcagagttcaaagtaagtgattacttgtactaaatgtactcacttagtacgttttggggacaggcataaagagccaatgaccaaaatggctgaagtgatttggcagggaatgatactctcctctgatttggggtagtaaatacaccaggtttcccagctgagtcactgtagggatggcttcttcccagatactacagggaagatctgttacctttgtttataagacaaaagacactttcaaagggcaggtcttttcatgtagaagagtcaggtccataactcggtagcatttaatttgaaaggttacccacattgagctcataccagtgtgaaacttccatggcattatcttttaaatccctaagattaaaaccccacacaaatgcactcaaagcaacccaatatcagtatcctgcagtttctatgggccctttctgcagcctttactcatggaagacaagggatctgggtttgtttaggaaacattttgtgagcattgtccaagccctaagtatggttggcctaagctttgctgaagctaagatcagtctgtttatgtttgcttaaaataggaacttaaaggactaaaatgtcatcattatttatcctgattatagcctaatggtattttattttctctacagcaatatgactgctaaaagaaccaacccaggacagagccacaatcttcctctatttcattgtaatttatatatttcacttgtattcatttgtaaaactttgtattagtgtaacatactccccacagtctacttttacaaacgcctgtaaagactggcatcttcacaggatgtcagtgtttaaatttagtaaacttcttttttgtttgtttatttgtttttgtttttttttaaggaatgaggaaacaaaccaccctctgggggtaatttacagactgagtgacagtactcagtatatctgagataaactctataatgttttggataaaaataacattccaatcactattgtatatatgtgcatgtattttttaaattaaagatgtctagttgctttttataagaccaagaaggagaaaatccgacaacctggaaagatttttgttttcactgcttgtatgatgtttcccattcatacacctataaatctctaacaagaggccctttgaactgccttgtgttctgtgagaaacaaatatttacttagagtggaaggactgattgagaatgttccaatccaaatgaatgcatcacaacttacaatgctgctcattgttgtgagtactatgagattcaaatttttctaacatatggaaagccttttgtcctccaaagatgagtactagggatcatgtgtttaaaaaaagaaaggctacgatgactgggcaagaagaaagatgggaaactgaataaagcagttgatcagcatcattggaacatggggacgagtgacggcaggaggaccacgaggaaataccctcaaaactaacttgtttacaacaaaataaagtattcactacca

SEQ ID NO: 128 - DNA, 2022 bp, Homo sapiens
agcagaggggctgagaccaaaccagaaacctccaattctcatgtggaagcccatgccctcaccctccaacatgaaagcctctgcagcacttctgtgtctgctgctcacagcagctgctttcagcccccaggggcttgctcagccaggtaaggtccctctctccttctccttgaagcacattgccccctctctgggttatcctggaccaatcaagaagacctgatacccacagtctcactttaacagctacttttccaagataaggtaacttagaaaaaggataaggggtgagcccaaccacacagctgctgttgggtagagcctgaactagaattccagctgtgaaccccaaatccagctccttctaggattccagctctgggaacaccctcagtgcagttaccactccagctgcttccagcagaatttgggatcagggtgatcaaagacaggaggcttctggggatgggtgtgcgggctgtttccagataccgggagacccagaatctggtctgtggaagcccagcttccagaaacagcagctctgcagaggtggtacgtatcagggaaactcatgaccaagcattgaatgctcagagcctaaaaggggatccatagttggggtacccttgctctaaggaattggattattatattagcccctcctagcaatgcccagagtagccatcaattcctcttccgtctttcaactggtgatggtgcatccctatttcacagtccataaaagtgaaagggagtttatgaaatgcctcaaagggcagagacattgggtttgggatgggcagcttttccctccacctcttcctttctttctgattccttcttcttaccattccctgttttacaaacagaaagacccaggacacaccctcaatggacttttcttcttgttgtttcattgcagttgggattaatacttcaactacctgctgctacagatttatcaataagaaaatccctaagcagaggctggagagctacagaaggaccaccagtagccactgtccccgggaagctgtaatgtatgtggacgatgaccacccacccctcacacctcagtcctaggttcttccctgggcagggaataggactagtatcagaatgagttggagtcaaatactgtgatgcatacagcatctctaaccttatcccagacatttgccagtgagaaacaatacaagtaaagaaagtggcttctcactctcagctccctttccagctatcattttacatctcagttcgttccttcatcctggaaccaagagagattcacttgggctaccaaaaagagctgcttctctgagtccccttcctttgttttatcttcttccttcatccctgaggcatccccatcagctaggctgatgggctagacagatttcccatagacttggtcacactcccaggctgaaccctcaaggtgttccatctgactgtctcctttctgctccacagcttcaagaccaaactggacaaggagatctgtgctgaccccacacagaagtgggtccaggactttatgaagcacctggacaagaaaacccaaactccaaagctttgaacattcatgactgaactgaaaacaagccatgacttgagaaacaaataatttgtataccctgtcctttctcagagtggttctgagattattttaatctaattctaaggaatatgagctttatgtaataatgtgaatcatggtttttcttagtagattttaaaagttattaatattttaatttaatcttccatggattttggtgggttttgaacataaagccttggatgtatatgtcatctcagtgctgtaaaaactgtgggatgctcctcccttctctacctcatgggggtattgtataagtccttgcaagaatcagtgcaaagatttgctttaattgttaagatatgatgtccctatggaagcatattgttattatataattacatatttgcatatgtatgactcccaaattttcacataaaatagatttttgtataaca

SEQ ID NO: 129 - DNA, 2030 bp, Homo sapiens
ccccttttagcatgctgaccagccctggcaacggagctcaaggcatctatgtgccactgctcaacagtgagtgacgtcatgggcacggccaggtctttatcagttctgccggataaatagccaactgcactaggtctggagagacagcaaggtgctgtgcggcagagcatttggggtctcaaagaagcaggtgagcctgggcccgaggggctgggtggaggagcaccttggtgcttctctgctggggaagggacaggggacagggcatgctcaggaagacaggcaggctgaccccgcctggaaggcacccagagacaagaggggtgggcgtagtgacctcgtgcccttttaggggagatgctgctggccagaggccgttagggcccccactaccaactccatgttactctctctcaccagtggccaccaccatggatacaggccccgaccagtcctacttctccggcaatcactggttcgtcttctcggtgtaccttctcactttcctggtggggctccccctcaacctgctggccctggtggtcttcgtgggcaagctgcagcgccgcccggtggccgtggacgtgctcctgctcaacctgaccgcctcggacctgctcctgctgctgttcctgcctttccgcatggtggaggcagccaatggcatgcactggcccctgcccttcatcctctgcccactctctggattcatcttcttcaccaccatctatctcaccgccctcttcctggcagctgtgagcattgaacgcttcctgagtgtggcccacccactgtggtacaagacccggccgaggctggggcaggcaggtctggtgagtgtggcctgctggctgttggcctctgctcactgcagcgtggtctacgtcatagaattctcaggggacatctcccacagccagggcaccaatgggacctgctacctggagttccggaaggaccagctagccatcctcctgcccgtgcggctggagatggctgtggtcctctttgtggtcccgctgatcatcaccagctactgctacagccgcctggtgtggatcctcggcagagggggcagccaccgccggcagaggagggtggcggggctgttggcggccacgctgctcaacttccttgtctgctttgggccctacaacgtgtcccatgtcgtgggctatatctgcggtgaaagcccggcgtggaggatctacgtgacgcttctcagcaccctgaactcctgtgtcgacccctttgtctactacttctcctcctccgggttccaagccgactttcatgagctgctgaggaggttgtgtgggctctggggccagtggcagcaggagagcagcatggagctgaaggagcagaagggaggggaggagcagagagcggaccgaccagctgaaagaaagaccagtgaacactcacagggctgtggaactggtggccaggtggcctgtgctgaaagctaggtcctccgggggaggagggtgtagctggcatgtcatcctcagggcgcttcctcgctcacgccaggagggacttggagtggcgagctggggcccgatggggcttgggggcagagtagacatctagcctccctaagggtatgcgcgctaaagcccagctctcgatctcacctccatccccatccacccacacactatggattgggctctgggaaggggtcagggtgagaggctgctctggagaacaatgaggtcctcatagcagcaggcagctcctgtgttttcttgagggtggcagaggagctaagagcagtgcccagggtctgagggggctgcccagtgagtggcaggggcaggagaggggagaaccccatcctcagagctgctcccagccagcgagtcaggagcgggggagacagggctccagggatgaggccgcattctgctcccacagcgccttttccagaaagttcccattgctcaataaatgtggatcatcagagacatttatgaacaatgacagaagaaaaattacccaaataaatgtggaagcaagcaaaa

SEQ ID NO: 130 - DNA, 11587 bp, Homo sapiens
atcgaatattttccatgatcaaacgctgttcattggctttccctcctccgctaaggcggagcctacttctcttgcgctcccatttgggtcgtgccattctcaggggaaccaaccccaatacctaagggaggctgggaggcgtgtcctcaggaccgtagttcttattggtttcgctgctcgctgtggggtgggctggtgcagccgcagctgttgcttattggcccaccgattccatggggaggaacttggctgggcctaaactcaatccgtggtctggtacaggtttcagggcaaagcggccatgcgttccgggggccgcgggcgaccccgcctgcggctgggggaacgtggcctcatggagccactcttgccgccgaagcgccgcctgctaccgcgggttcggctcttgcctctgttgctggcgctggccgtgggctcggcgttctacaccatttggagcggctggcaccgcaggactgaggagctgccgctgggccgggagctgcgggtgaggctgggcggggacccgggcaccgcggggaccctcattccctccccgctgttacccagggttgacgtggctttagcgtacggccctaaccgcagatgccaccgtcttcgtcatctgagcgcatgacccttaccaaaggaataaggcttcgggctggttctgcaacagtagcttccttttaagaggaaaggtctgaaatagtaagacgggggggttcagggttctacgcctttagtcaactatttggaagagtcccttcctccatctcccctctctctcactgggcctcgatttccccatcaagtttgaggtaggctggaccggatggtcttggaaggacttttcctgagccttggatttatcctagaagtctccgatgctggaggcggcagattaggaagagaacccggggctcctcgcgggtgacggcgcccggggtagggttgaaatgggggggttgctctcattcttcccttccctatcccacctccttcccaaggtcccattgatcggaagcctccccgaagcccggctgcggagggtggtgggacaactggatccacagcgtctctggagcacttatctgcgccccctgctggttgtgcgaaccccgggcagcccgggaaatctccaagtcagaaaggtaaagggacccacctccagtccctgaccccctagccctccagggaatgggaaataagaatcctgttcaagatcccaaagaagctaagaggaggaactggggctctgactggagttaatcggactctagactccatgctggtaacaaaccaccaggctgtactgccccccttaatgcccccaccaaaagcttactgtgtgctaggcataggcaacagacagccctataaggtgggtaccaatatgatcttcattatgcagatggggaaactgaggctcagagaggttatacacattgcacaaatcctacagataataagtagtagaccttagccgggtgcagtggctcatgcctgtaatcccagcactttgggaagccaaggtggaagaatcacctgagaagtttgagactagcctagtcaacctagtgagacccaatgtttagaaaatcatagacctagagttgaacccaaacaggttggctccgagctggtgctgtaatgtatctgttgtcttccagaaagcatgaagagtcatttaaaggccaggcgcagtggttcacacctctaatcccagcactttgggaggccgagacaggcagatccctcgagatcaggagtttgagaccagcctggccaacatggtgaaacctcatctctactaaaaatacaaaattagccaggcgtggtggtgggtacccgtagtcccagctacttgggaggctgaggcacgagaatcacttgaacccaggaggcggagactgcagtgagctgagattgcgccactgcaccccagcatgggtgacagagcgagactccatctcaaaaaaaaaaagtcacttaaatactgcctgagtcccaatgctacctcatccacttagattgtgaccttggactggtttcttttttattttattttattttattttattttgagatggagtctcacactgtcgcctgggttggagtgcagtggcgcgatctcggctcactgcaacctccacctcccaggttcaagcaaatctcatgcttcagcctcctgagtagctgggattacaggtgtgcaccaccatgcctggctaattttttgtatttttagtgagacggggtttcaccatattggccaggctggtctcaaactcctgaccttatgatccgcccacctcagcctcccaaagtgctgggattacaggcgtgagccaccgcgcccggcctggactagtttcttaacctctctgagcccatttcctcatctgtaaaatggggtcatgtattggcagtccctcccctaaatggttcctagaagagggcttagcacacagtgagagctatttaagggtaagctgtgatgagtcttgctggcttcaagaggtggggtctccccaacatctggcacccagtaggtactcaccagcactgtcaagggaatgattttaatcagagtagggggctgggcacagtggctcacatctgtaatcccaacactttgggatgctgaagcaggcagatcacttgaggtcaggagttcgaataccaggctggccaacattgtgaaaccccatctctactaaaaatacaaaaaatagccaggcgttgtagggggcgcctgtaaccccagctactcaggaggctgagtcaggagaatcacttgaagccaggaggcagaggttgcagtgagccaagatcaagccactgcactccagcctgggtgacagagcaagactccatctcaaaaaaaaaaagaaagaaagaaagaaatccattcaatcagagtggggctttagtgtcaacccatctgctctgcatggctcaggtcacgtggcccttctccccacctcctccccagtccccgtccaccctcccacctctctcttgccgctagttcctggaggccacgctgcggtccctgacagcaggttggcacgtggagctggatcccttcacagcctcaacacccctggggccagtggactttggcaatgtggtggccacactggacccaagggctgcccgtcacctcacccttgcctgccattatgactcgaagctcttcccacccggatcgaccccctttgtaggggccacggattcggctgtgccctgtgccctgctgctggagctggcccaagcacttgacctggagctgagcagggccaaaaaacaggtgaggagcaggagtcggggagggtagtgggctacctccaccttttcccaagcccccaccctcccttgcctggacatttgtcatccctctcgtcttcccactctactccacgcacagagccacagggatcttttttttttttttgagacggagtttcgctcttgttccccaggatggagtgcacatggcgagatcttggctccccgcaacctctgcctactgggttcaagcaattctcctcccaacctcaggtgatctgcccacctcggcctctcaaagtgctgggattacaggcgtgagccaccgcgcctggtcatcacagggatctttttaccttctagatgtcagattctctttcctctcccccaaaccctcccagggctcccgcctcattccagccataatccagagtccttatattggcccacgagctgtgccctgttacctctccagcctcatctcccacccctcacctcttgctcactctgctgtagccacccccacctcctctgggttcctcaaacccgcagagcttgctcccacctcagggcatctgcacttgctgtttgctttggatagaatgtgcttttctggccaggctccgtggctcacacttggaatcccagcactttgggaggttgaggtgggtggatcacaaggtcaggagttcaagaccagcctggccaacatgatgaaaccccatctctaccaaaaacacaaaaattagccaggcttggtggtgcacacctgtaaccccagctactcgggaggctgaagcagagaattgcttgaacccgggaggcggaggttgcagtgagccaaagttgcaccactgcactccagcctgggcaacagagcgagactccatctcaaaaaaaaaaaaaaattatctgggagtagtggcatgctacttgggaggctgagaggggaggatggcttgagtctaggagtttgagactgcagtgagccatgatcgtgccactgtattctagcctgggtgacagagaccttgtctcttaaaaaaaaaaaaaagaatatgcttttcatagatatcttcctggctggctcccactcttcactcaggtgtccactccaatgtcaccccttcaaagaggccttcccggccgggcgtggtaactcgcacctgtaatcccagcactttgggaggccgaggcaggcagatcatttgaggtcagaagttcgagcccagcttgtccaacagggaaacctcatctctactaaaaatacaaaaattagctgggtatggtggtacatacctgtaatcctactacttgggaggttgagacaggaggatcacttgaaactgagaggcggaggttgcagtgagccgagatcgcaccactgcactccagcctggatgacagagcgagattctgtctcaaaacaaacagaaaagaaaaacacaggccaggtgcggtggctcacacctgtaatcccagcactttgggaggccaaggcaggtggatcgtgaggtcaggagattgagaccatcctggctaacacagtgaaaccccgtctctactaaaaatacaaaaagttagctgggcgtggtggcgggcgcctgtagtcccagctacttgggaggctgaggcaggagaatggcgtgaactcgggaggcagagtttgcagtgagccgagatcgcgccactgtacgccagcctgggcgatacagcgagactccgtctcaaaaaaaaaaaaaagaaagaaaaaaaagaaaagaaaagaaaaacacagatttaatcatgctcctgccctgcttaacccctctctgtgcctccccagtgtccctataacaaagcccacactccttggcccttgctaaaccttccgtacccctctcaaacctctgggaccccttccctggccatagccttgccctgtgttgctcccttggctgggaatactcttcctcctgctccattttgccaggccagttcctacccattctcatggcaaacatcccttcccaaaagacccaacgccctctccaggccaggtcatcccccagcctccttcctatgccctctcaggactctatagttcttagaagcatttgtctcaactgcatttcactgtttgtataattattcatttgtggatctatctggttcaccaaactgagcttgaggaataataatcagagataacccttatttagttatatgccaggcactgttctaagacctggattcaaaccttaccctttgaaaagaactgttattgccgggcgcggtggctcacatctgtaatcccagcactttgggaggctgaggtaggtggatcatttgaggtcaggagttcgagaccagcctggccaacatggtgaaagcttgtctctactaaaaatacaaaaattagccaggcatgatagcgggaacctgtggtcacagctgtatgggaggctgaggcaggagaatctcttgaacctgggaggtagggggtggaggttgcagtgagtcaagattgcatcattccactccagcctgggtgacagagcaagatttattctaaaaaaaacaaaaaacaaaaaaaaaacaaaaaacctcttattaaccccatttatagatgaagaaactgatccttccagaagttagtaacttccccatgcctgctttgttatgaagcagccaagtacggatttgatcccagacaactgactcggaatctgtgctcttggctaccacgttctatgagtgaggacaccttatgtgttctcttaagcatgcaagcgggcaagaagtgtgggtatgttgaggctgagggctagtcctgagctggctctggccacccccctgctgctcccacaggcagccccggtgaccctgcaactgctcttcttggatggtgaagaggcgctgaaggagtggggacccaaggactccctttacggttcccggcacctggcccagctcatggagtctatacctcacagccccggccccaccaggatccaggctattgtaagaccagggtcccctggcttctggcgagggagggagcaggttaagcagggctggcgtcatcctgcacgggcccctccagtcctagcctttctccttaggagctctttatgcttcttgatctcctgggagcccccaatcccaccttctacagccacttccctcgcacggtccgctggttccatcggctgaggagcattggtaagggtgaatgcggaggtgggccccagcccacctggggtatggggtacagggcggtgggctggggtaggacaggcacctacactctaaaggctcatccaccagtctgggccacatagggagaccccatcttttttttttttttttttttgagatggagtctcgctctgtcactgagactggagtgcagtggcatgatcttggctcactgcaacctccacctcccaggttcaagccattctcctgcctcagcctcccgagtagctgggactacaggcgcatgccaccatgcccagctaatttttgtattttagtagagacagagtttcactatgttggccaagctggtcttgaactcctgacctcgtgatccgtccacctcagcctcccaaagtgctgggattacaggcgtgagccaccgtgcctggtgaccccatctcttaaaaaaaaattagctgggtgcagtggcatgcacctgtcatcccagctactggggagtatccttagagcctgggaggtcaaggctatagtgagccaagattgcgccactgcactccagcctgggcaacagaatgagatcctgtctcaaaaaaataaaaaataaaaataaaataaaggctgggcttggtggctcacacctgtaatcccagcactttgagaggcaggtggatcacttgagctcaggagtttcagaccagcttgggcaatatggcgaaaccctgtctctacaaaataaaaacaaacattaggccaggcgcgatggctcacacctgtaatcccagcactttgggaggccaaagcgggtggatcacctgaggttaggagtttgagaccagcctggccaacagggcgaaaccccatctctactaaaaatacaaaaagttagctgggcgtggtgacatgtgcctgtaatcctagctattcgggaggctgaagcaggagaatggcttgaacctgggaggcggaggttgcagtgagccgagatcacgccactgcactccagcctgggcaacagagcgagactccatctcaaaaaaaaaaaaaaaaaaaattagccaggcatggtggcacctgcctgcagtcccagtgacttgggaggctgaagtggtaggatcacttgagtctgggaggtcgaggctgcagtaagctgtgatcacaccactgcactccagcctggggacagagtgagactctgtctcaaaaaaaagtaataataaaaattaaaattaaaaaaattaaaaattgtttttaaaaataaaggcttggctgggcgcaatggttcacgcctgtaatcccaatactttgggagactaaggtaggtggatcacaaggtcaggagtttgagaccagcctggcgaatatggtaaaaccctatctctactaaaaatacaaaaattagctgggtgtggtagcgtgtgcctgtagtcctagctactccggaggctcaggcagaagaatcgcttgtacctgggagcacaggttgcagtgagctgaaattgtgccactgcactccagcctgggtgacagagcgagactctgtcactaaataaataaataaataaacaaataaataaataagaaaataaaataaaggctcacccagcctttcctctacctccctagcctttctaaggaactagagattagtaatagtgattaccagacaggggctctaaggtgagacagccgtggtttccaatcttaccagctggatgaacttggacaagtggcttcatttctttgagcctcagtttcctatctgtaaaacggccagtgggggccgggcctggtggctcatgcctgtaatcccagcactttgggaggccgaggtgggcgaatcacaaggtcagcagttcgagaccagcttggccaatatggtgaaaccccatctctactaataatacacaaattagctgggtgtggtggtgggcgcctgtactcccagctactcaggaggctgaggcaggagaattgcttgaacccgggaggcggaggttgcagtgagccgagattgtgctactgcactccagcctggcgacagagcaagactctgtctcaaaaaaaaaaaaaaaaaaaaggccggagggcccagacatagtggctcatgcctgtagtcccagaaatttgagtgaccaaggcaggaagatcacatgaacccagaagtttgaggccagcccgggcaacacaggaagatcccatttctacacacacgcgcacacacacacacacacacaattacccaggcatgggggcatgcgcctgaagtcctagctatttgggaggctgagactgaaggatcacttaggccagcgagattaaggctgcactgagctgggattgtcccactgcactccagtgtgggtgagagagcaagatctttttttttttttttggagacagaatcttactctgtcacccaggctggagtgcagtggtgcaatctcagctcactgcaacctccacctcccaggttcaagcaattctcctgcctcagcctcccaagtagctgggattacaggcgcccaccaccacacccagctaatttttgtatttttagtagagacagggtttcaccatgttggccaagctggtttcgaactcctgacctcaggtgatccacctgccttggtctccctaagtgctgggattacaggcatgagccaccacaccaggccacaagatcttgtctcaaaaaaaagaatgtctatgtcttagactctgagggattgaatgagaccaggaacatagtgagcccacaggaaggagtaactggcattcactcttgttgggctgaccagggctttgtctctgggtgctctgccttcctctgatttgtggactggggaccttcgactactaaggactaacccttcctctctaatcgcccccacttccagagaagcgtctgcaccgtttgaacctgctgcagtctcatccccaggaagtgatgtacttccaacccggggagccctttggctctgtggaagacgaccacatccccttcctccgcagaggtaccagctgcagggagggatggagggtgggtgtccaaggaagccacaaattggaactggccaagtccccttcccagggctggggaatggtgctaagtggccttaacctctttgtgctttgatttattcatctgtaaaatggggataatactccctatcttagagtattgttgaggggattgaacatgctaacaccggtaaagaccttacttggaccagcacccagcacatagcaagcattccagaaatgtttgcagctgggcacggtggttcacagctgtaatcccagcactttgggaggctgagcggggtggcggggggggatccttgagcccaggagtttgaaaccagcctgggcaacatggcataaatcttgtctttactaaaaatacaaaaaaattagccgggcatggtggttcacacctatagtcccagctactcgagaggctgaagtgggaggagcacttgggcctgggaagtcaaggctgcagtaagccttgattgagccactgcactctagcctggacaacagagggtgatgatatctcaaaaaaaaaaaaagtgccaggctgggcatggtggctcacacctgtaatcctagcacgttgggagcctgaggcgggcagatcacctgaggtcagtagtttgagaccagcctggccaacatgatgaaaccccatctctactaaaaatacaaaaattagacaggtgtcgtggtgcctgcctataatcccagctacccgggaggctaagacggtagaatcgctggaacctgggaggcagaggctgcagtgagccgagatcacgccactgcactccagcctgggcgacagagtgagactctgtctcaaaaaaaaaaaaaaagtgccagaacatagtatctttcaccagtgtgtggtggcaaggcaaggttacctagaggttgggcttgggctcctgggttgtggtgggctgcagtggacctgacaaagtctcctctgtcacttcaggggtacccgtgctccatctcatctccacgcccttccctgctgtctggcacacccctgcggacaccgaggtcaatctccacccacccacggtacacaacttgtgccgcattctcgctgtgttcctggctgaatacctggggctctagcgtgcttggccaatgactgtggagaggactgtgagagagaaggtcccagcgggggccagtgaagctcaggcaggatctgcctagggtgtgctggtttgtccttttcatacctttgtctcctaattgtgctacaattggaagaccttctttcttttgattgtctcaagctgccacccttcaaggacagggaagagaccactgtgggatgacagccagaggaataagaacttgctccctccccagaggtaaacacttggtccaaaggtttgcagggaccaaatactgttctttttttttttgagacggagtctcactgtgttgcccaggctggagtgcagtggtgcgatctcggctcactgcaaactccgcctcctgggttcacgccattctcctgcctcagcctcccaagtagctgggactacaggtgcccgccaccacgctggctaattttttgtatttttagtagagacggggtttcaccgtgttagccaggatggtctcgatctcctgaccttgtaatccgccagcctcggcctcccaaagtgctgggattacaggtgtgagccaccgcacctggcaaaatgctgttctttaagtcagcgaactgaaaaagtaaaagactgctgggtgtggtggctcacacctgtaatcccaacactttgagaggctgagggggaaggatcacccgaggtcaggagtttgagaccagcctggtcaacatggcgaaaccctgtctctactaaaaatacaataattagctgggcatggtggtgggcgcctgtaatctcagctgcttgggaggctgaggcaggagaatcacttgtacgcaggaggcggaggttgcagtgagccaagatcacaccactgcactccagcctgggcaacagagcgagactccatctcaataaataaataaataaataaatattttttaaaaaga

SEQ ID NO: 131 - DNA, 31688 bp, Homo sapiens
aagtctgaatgctgtgtggacagaggaggaggacccaataaggtaggggtattggagtactcgggtgcctgggaagatccaagcccggcctatagggtcaaggtcttttccaaaacaggggaaaccctttctggttcccgaaggtcctcccttccctattcgctgaacaggtgggtgccaagaagcccctgtcttgaggacagagagactgcggtctggcctccccagacccaggcagcctctaacatcacagccacagagcagaaactggcctggcttcctcccaggcccagaaggccccagctggccacctccctttgtttgtcttgggaggggcaactgctaagcaaacagggaaggggaatcccgattcggcctctctgtctgtccggctagccgttacccaggcccgggctctggtgcccactgaggcctggctccttcctgaccctttgtgtggaagggacacagggcaggagtgggtacagagaacacccagggctttccgaaaaaaatagcccaggcctcccacagatgagagaggagctatgtggttcggtaaacctcagttccagctacaggcaaatgggattaactgagcacttactgtgttggggccctggcctagccccatgcatgccagagccctccagatactgcctggccaccctgcagggtcctatcagatctcgagtctccaaaagaggaaacaggcttggggtcataagggaatgaggttagcaggggtggtaatcccacccagatctctctgactctcagatcacgggttttttttttttttttttttttttttctgagacagggtctcgctctgttgcccaggctggagtgcaatggcacaatcatagctcactgcagcctcaaattccgggattctcatgtgatcctaccgcctcagcctcccgagtagccagggctatagggacgtgccaccatgcctagctaatttttaactttttgtagagataaggtcttgctatgctgcccagactggtctcaaactcctggcttcaagtgatccttctgcctcagcctcccagagagctgggattacaagcatgagccactgcgcctggtccccaactgtgctcttaatcatagctcatttctcttagtggagccacgggggaaggtggtaagggggcttaagcgggagctctatccctcatctcttttttctctttcccagagaccacaccgctgttccagaccctctccatggatgatgtcctgcccctgatgccttgggagaccctgttggcacagggcagtccccagggctcgcctgacctcccagcagggcagcggaagcagcagccacagggtgacagggcccagggcctggcctctgagtcctggaagctcctggaggtgcccatcattcacataacgccatccagtgatggggagtcccccgcctgcaccccaaccccccgacgccggcagcagcagaggatgccagacccgcagagtctgtcccaggacaggtcagacctgggcagtgggacaggaaagagggtctctctgtctagggagggttctctctgtcaagggtgggttccttgtggctgcgggtcagagcacaaccttagccccacagagggctgactcaaagccacgaaacagatgcacaaacaaaaggtaaaaactgagggtgtgcgttgggacaaccagctatgactgagctcagctgagttctgcctagtaagagtggaggggaagccgggcgtggtggctcacgcctgtaatcccagcactttgggaggccgaagctggtggatcacctgaggtcgacagttcaagaccagcctggccaacatggtaaaaccccatcttgactaaaaacacaaaattagccagcgatggtgatggatgcctgtaatccaagctattcaggaggctggggcaggcggtttgcttgaacctggtaggcggaggttgcagtgagccgagattgcgccactgctccagcctgggcgtcagagcaagactctgtctcaaaaaaaaaaaaaaaaaagagtggatgggtggagagggaccccacccagtgtttttcaaactgtaggtcaagacccatttaagggccataaaactaatacagtgaattgcaatcagcccttgttttttgttttttgtctttttctttttgagacagcatctctctgtcacccaggctgaagtgcagtggcatgatcttggctcactgcaacttccattgctcccccctccacccagcagctgggaccacagatgtgcaccaccacacctgtctattttttttgtatttttagtagagacgaggtctgaccatgttgcccaggctggtcttgaactcctgagctcaggtgatgcaccctcctcggcctcccaaagtgctgggattgtgagatgaggcacccggccgcaatcagcacttctttatccaaatcaaaataaaatagaattgcaaataacaccatgcgtgaggcctaatgagggtaagtgtggtttcttacaacttctgtggcattatgtgtatttctaagtgcgtgctggaagcccatgtgaaaggtatttcctgctgtagatcacaggccaaaaaaacaaaaaaaaaaaaaaaagaagaagaagaaaaacaaagaaaaaaagaaagtttaaacaaaacttctgaaaagaaacactatctctggtacaaggagacaggaaatgggaggttcagggccatagggggaagaggaaagaactctaccgaccctgaatagaacaagcagccactgtggtttcttccaacaagggacactccataagcgttaaagtttaggaagcagagctttgtgcatggatgtggagaaatcgcagaaacaatgataatgggggacagcaagttgcaaatgaaacagagggagcctaatcgtgtatctttttaaaaagatactggataataggtgatagtgttggtggatgcctcctgatgtagaaaaaggacagaaaagtacacagggtccaggcgtgctggctcatgcctgtaatcccagcactttgggaggccgaggcgggcagattaacctgagatcaggagttcaagaccatcctgaccaacacagtgaaaccccatctctactaaaaatacaaaaattagccaggcatggtggcgcatgcctgtaatcccagctattcaggaagttggggcaagagaatcgcttgaaccgaggaggtggaggctgcagtgagccaagatcgagccactgcaccactccagcctgagcgacagagcaagaccttgtctcaaaaaaaaaaaaaaaaaaaagcgcaggaaggaaacacaccaactgcatggcaggcagaaggctccttggggggcacgggaagggaaaggagggatggggagccaggcctttggttgtaagtgtaatcatttatttcttttaaaaaaaggacctgaagcaaaatggcaaaatgtccacatctattctatataggtacaggggacatagaggactgttatattttcttcctttttttttttttttttttttttgagatggagtcttgctctgttgtccaggctggagcgcagtggtgcgatcctggctcactgcaacttccacctcccgggttcaagcaattctcctgcctcagcttcctgggtagctgggattacaggtgcaagccactacacctggctaatttttttgtatttttgatagagatggggtttcactctgttggccaggctggtctcgaactcctgataggtgatccaccctccttggcctcccaaagtgctgggattacaggcgtgacccaacgcgcctgacctgaaataaatattatttaattaaaaaactaaaagcattacactagaagaaacagaccaaagagaaatctaaagagatcagttggacagaggaaggtggtgggaggagggcctctcttccattggccggtgggaggcagcaaatgtcagatggtggatgggggttttagaggtgggggttagcatgagaggtagggcacggcgatagggggggtgctgtccatgcagagggaataaccagtgcaaaggtcttggggtaggaggcaggaaggtgcctggtgagttagaagaacagcgggtaggctggatggggggtgtgagccagggggagatgaggagctgaagtcagagagctgacaggggccttgggtgccaaggtgaggactttgcttttacctggagtgaggtacagctggggcagggctctgagccaggagggtagttaactgactcaggtggtcccaggctctctctggctgcaggtgagaacagacagtaggggcagggatgggagcagggagatcaggcaggagaggatggaggctgggccagggcgtgggcagcggaggaagaagagtttagaatggagcgattgattttatacgtggagcccacagtttgtgacggattggatgtggtgtgaaggaaaagagagggtcagaaaagactctgaagttctgggcctgccattcatcaaaatggagaagtcaggtgggcttcttttgcaggaggaggggaagggttgatggagagggttgggaagggagttttttcaaaagaggcggggacagcgtaccctggagagcgctggggagccacagccccggagctgtgaggtgggactcgcatttctgtgtggttgggccaggagtccaggacaccacctgactctgacctcttgcagacggggcgggggaggggggacgcaggttatggcgtcagagcaggatcgaatccaactctgccgcctacctaccaggtgaccccaacaagtcacttcccatcttagaggccgggcttctccttccgtaaaaggactgattttgcccgttcctgcgctgtccccgggaaaagcccttaccaccgagttagtgggactcccagcactggggtgatgagcgcaaggtctcagcacagataagagccagggaggctggattctgacttggtacttggcctggctgaccaaaactgggaagtccctagaaacggaggcaccggacctcctgggaccaggaacccgggctcagagactgggagagggaaggaggaggcggccaaccggccccaccccttcccgccagcttcaggccccctcccccatacatacacctcggtttcccagcatctccagtcctcccccaccttcgccccggctctcaggttcctccctgggaggtccaggagcttctggccaggggcatagtagttgctagggacccttttctaggtactaggggagggggctccccaacctgcgggcaggcagctgcctccacgatgtttggttttaataaagtctctttgtttccttctctgtctctctgcccctctgctttcccttctctgtccagtccctctctccccggcttctccctccttctaggcctctgcggcccctccccgccttccctcccgggctgggggcggcgccgtgacgcggcggggcgggggaaggaagggggtgtcgctgacgccgcggcggcctccggcggctccggccttttgtgcgggcggttgggtcgggtgggggcggcggccgcggaaggccaggccggtgccctgcggggacgcccagcgcagcccagccccgcgcagcccagccctgccctgccctgccctgccctgcgcccggggcgcgcccaccgcgccgcatccatgttcgagtaaggaccgggcgactagagctcagggaccgggcgcgcgggggaggccaccggagggagggggcgccgcgggcttggggagggggcggagcggccgctgcagaggtcgggggcctctgcacatggctctggccggggcgatcggggtgggggcggggcagggggcccccgggcgaggggtgcagctggggagtggggcgcggacgcagggcagggcccggggtctgggtcgccactgccggcccgcgacgcactgggttgcggggtttggctgggggcccgcgggttcatctggcggggagggccctcaggcctggcaaccccctgcctggtaagccaggggtgagcgcgaggccgaactggggctccggcctgggatggagacaggatcgggaccagcccaggcccacaggccgcggagccctgggcgcgccgggagtaggcagccccctcctgcctgggccccctcccaccgtccttggctgttgcgggtctcggggctgccgggggtgggggcttcctgcgtctctccaggaccgcgtgcttgaggtcatggagggcggggggtcctgtgtgctcggaattgacttcttactccccttccggtccaggtgggcgcatgtgcttccgactgtgaattgtcttgcaagtgtgtgtacgtgtgtctggggctgctagcctgcagcagctttgggcctctgatagagttcctgcgtgtaacttaaccactaattctgaccgcggctctgtgtgtcactgtaagttacctgtgtgtgtctggggctccaaatctgtggctgtgagcagctggttgtgtgcgtgttgtgtctcattccatctgtagctccctgtgcaaatataaattacccctgtgtgtctgagtgtgacgttggagtgtttgtacatgtgtctggagttaccgtgtgtagcagctctgatccttcttgggctgtgtgtgttttaccattaattctatctgtagctccaagcgttgctgtaagttaccagtgtgcgtcccattgtgacttagtggtgtgtgtacaagtgtgcctggggctctgggttctaccatgaccctctgtgcctgcatatgcctgtaatttagctctgaaacgctcttctttttttttttttcttttgaaatagagtctggctctgtcgcccaggctagagtgcagtggcacgatctcggcccactgcaacctcctcctgctgggttcaagcaattctcctgcctcagcctcctgagtagctgggattacaggcgtgtgccaccacgcctggctaagttttgtatttttagtagagatggggtttcaccatgttggccaggctgatctcgaactcctgacctcaggtgatccacccacctcggcctcccaaagtgctgggattacaggcttaagccatcgcgcctggcttgaaactctcatttagctctgtgtgccaatgtaagttacatttgtgacattgttgtgtgtctggggctctgtgagtgtggctgtaacttaatttgattccatctttgtgtgaacattcccttgtgtattcctttgtgacagtattgagtggtgcctaggcctctctgtgtacagctgagaccctctgtggttttgtgtgtgtgtgaacagtgtgagaccccttgtggctctctgtaggcttggaaccctcccttctaagaccctgggagtacccagggcactttggaggcaataatgataactgacgttgtccacctgttacagttagtatagcatgtgccacgcattattccactacctggccactgtgtcctcgagatccacgccctgctcggctgcattattcccaagtcctgcttgactgtgagcatcagggctctccaccagctacagccactgacacctccaccccttgccactttactttttcttttcctttttctctttcttttagacgcagtctcgctctgtcgcccaggctggactgcagtggcacgatctcggctcactgcaacctctgcctcctgggttcaagcgattcttctgcctcagcctccctagtagctgggattacaggtgcgtgccaccacacctggctaatttttgtatttttagtagagatggggtttcaccatgttggccaggctggtctcaaactcctaacctcaggtgatccacccgcctcggcctcccaaagtgctgggattacaggcatcagccactgcgcccagccccttgccactttagaagtagccttttctctgtcttccctgccagatggtgagcccagtgcgggcacgggaacaactcagtggggatgtgttggctgaccgtgggacctgatttacctgggactatgtatgtgtcacctggggtcttttgggactggtctttcactgtatggctgtctttggctctttgctgagacttcctcgtggctatgtgtgtgaatataatttatccgggactttctgtgggttgctgtatgtttctgtgaccctctgcagctctgtgtctgtgtgcacacatgcatgtgtctggataacttttctgggaaattgccatgtgactgtagcagactagcaatgctgcaggtgtgtgtgtgtgtgtgtgtgtgtgtgtgtgtaattactctgtggctctctgtagcatacctatgatgctgttgctctgtgcgtgtgtgtgtgtgtgtgtgtgtgtgtgtgtgtgtgcatatgagagagagagagaggaaagagactccttgcaattgtagggaaatgcagtttacccctgacacctactgtgtgacaatcattgagtttcccttttatgcacacctgtggatgcatccgcccttttctgaccagaggctgctctgggtccactggggcctaggaagttggaggtcaggtgtctgcggaagcaaaacaacatcccttccgagtctcctcgcccctataacagtcccccaggctcctcccttcactctgccttcagctatcctggttgggcagccgcagggtccgcccttgagtacttcctctttgcccagccctggagcaaaaactgggggcgtggtccctgccctgtctgtgtgccttgagcctctcttcaggattccggcccccaggccctgcccctagatctgtggctgcgggaaagtagggcaggtctgtgtttcaggctagagggctgagaaaagcaggcaggggaggatgtggtcctgctgcttaggagtctctccctgctcaccagtgctgtctgggtgaagccaaactcctgactagggtcaccaggcctgtgcacctccgctactccctcagccccactggccacctcactcacactcagacctgccaggctcagtcctgtccctgagcttgatgttctccacctggagtcttctcccagcctttgccacatgtgttctttgtcctcaggtgaacaagtgggctttgttcaggaaggcttttgctgactgttactaaagaaattggttgggcacagtggctcatgcctgtaatcccagcactttgggaggccaaggtgggaggatcacttgaggtcaggagtttgagaccagcctgggcaacatagcaagaccccatcactacaaaaaaactttaaaaatcagctaggcatggtggtgtgagactgtagtcccagctatcagggaagctaaggctggaggatcgcttgagcccaagagttcgggcctggagtgacctgggaggctgaggattgagaattccttgagcccaggagttcggagctgccgttaaccatgattttgccactgtactgcagcctgggtgacagagtgtgaccgtgtctctaaaaaaaatttaaaaagcatctctgcccccctagttgtcccatcccttatctctgtggtcctcaaacttgaatgtgcgtcggaatctctggccccaccccagttctgattcagaaggttgggagtgggtcctggactctgccttttgaacactttccaagtcctgcctgctgctctctggggctcatactgagcagcattgctttatggcgttcaccagtgtctgaggtcgccatccctgctcacttgttttcttactgacggtctatgtttccctgtttcagcgtcaggtccttgcaggcaggggcttgtatgggctttgctcacttccttgtggcgggtgcagggtatttagaggtgaaaggctggagttgagggtcagtcatggaggcgcctaacatcaggcgtagtgcttgtgaggtccctgtcagggtcagcagagcgtcatgggcagtggtgcactgggctggcagccgcgctgtacactccatcttagtccgccagtccctgtgggagggaaagcagcgtagttaaaccaggtgccctccaggtactgggctttgtggatctcacctcacctccatctctgtgcaaccctaggaggtgggcactaattcccatcatacccaagaggaaactgaggcacaggagggttcagacactagctcagggtcacacagaaaggacgcggtggcacttgactggaaggtccttggactgtggggcccacactccaggctgctgccctggagacctgcagggtccaaggagtcgtgcacctgctggaacccaagttctatggggggcggggaaggagggccgatcacccaggccatccccaacagtatgtgctcacggagcacctcctgtacgccaggccctgctctaggtgatggggacactcaacatcgtgggtgggggttgggggtggggagagaaggataagaactagggggaaatactgaaggtcccgggaggcagcagggagacttgctttgcagaaagagagcagggagggggatcgggaggcggggtagggggtgttaaatagggaggtagggaaggtgtccactgagcagagacctgagggaggtgggggagccctgtggatgtggatgtggatgtctgggaggaagggcattttgagcagaggcaccgaccaaggcgggagctgggagagggagtgcagggctgatgagggcagagagggaccacccaggaggaccctgatggactcagatgatcccaggctccctcccactacaggtatgggcagggatgggaacagggagaccagggaggaggctgctgggatggcccaggggaaaagcagtggcctgggccactggctgtttaattattttattcacgtattttattccacaaatttattttacaagtgttacatgagtgcctaccctgcatcctgtcccgcattgtgctggggacagagcagtgacccacagacccgtgaaggacttggacctgtcatcagacagtgacggcccagagtagtccaggatgggagctgcccaggggactgtggggtcacgcatgagccaaagtcctgaaggacaaataaggatttgctaggcaaagaagaactacgatctggacagacagaatggcatatgttaaggcttggaggtaagagagacaactttgagttgccccaggtggtggagggaatcccacctgcaccccagaatacatcaaggcccctaaatgggaatcctgccttgaaataaaccaagcccatggccaggtgcagtggctcacagctgtaatctcctagcactttgggatgctgaggcaggtggattgcctgagctcaggagttcgagaccagcaacgtggtggaaccctgtctctactaaaatacaaaaaattagctgggcatggtggtgggtgcctgtaatcccagctactgcggaggctgaggcaggagaatcacttgaacctgggaggcgcaggttgcactgagctgagatagtgccactgcactccagcctgggtgacagcgcgactctttgtctccaaaaaataaagaaaaaagaaagaaaccaggcccgtatcctatggcaagtggtttgccgctttgagctagtttcctcctctgtaaagcagggatggtgaatcatatcaaaggcaccggcttgagaaataatacggttaatcatacggagagcttgacatatttcctgataaggagtcaacaaagaatgtccttttaaagttcccaacgccatccccacagtccttattacagttcgtgtttgcacagtgaagttgggagtgtcctgtttgttcagtgtctgcctccccaccagaaggctcattccccaagggcaggggccatgtcctgcgggctctactgatgccagctccagccagcgtgcagattattcatttagcctctggtggttattgagcattcactatgtgcctagagttttgggctctagggacccggtggtaaccaagacctgaaggtcacagtctgggtagacagtaaacaaacagtaaacaagcaggacactccagatagcctggggtgtggcgacagaggtgcctgccttaggctggatgatgcggaaggagagcatttgagctgaaggggacagagctggtgatgccggggccatggaaggacattcaggcggagggactacaaatgtggaggccttggcgtgggaatgagattggagagcttagggacaaaagcaggctgggatggccaggggagaggaaggacagggagagggaggacatgaggtcagtgaggttccagggccaaatcaccacaccaaggtgaggtctttgcttttacctggagtgaggtgcacccagggcagggctcagacctgactcagatggtcacaggtctcctctggttgtaggacaccagtgaagaggctgctggggtgtccaggctggaggtgatggaggctggagcagggagaaatgggtataataaaaataacggatgctgggtgcggtggctcacgcctgtaatcccagaattttgggaggccgaggtgggcggataacctgaggtcaggaaggagttcaagaccagcctggccaacatggtgaaaccctgtctctacaaaaaatgcaaaaattagcggggcatgatggcgggtgcctatgatcccagctactggggaggctggggcggaagaatcgcttgaacctgggaggtggaggttgcagtgagtcgagatcatgccattgcactgcagcctgggcgacagagagagaccccatctcaaaaaaataaaaataatagaaatagagctgggtgcagtggctcacacctgtaataccagcactttggtagtgcccaaggtgggaggatcacttgaggtcaggagtttgagaacagcctgggcaacatagctagaccccatctgtacaaaaattttttaaaaataaaaaagctgataacagtggtgtgtacctgcagtcccagctacccgggaggctgaggcaggaggatcacttaagcccgggagctcgaggctgcagtgagccgtgattgtgccactgcactccagcctgagtgacagagcgagaccctatctctaaaaagaaaataaaaataaataatggaaatagattttgaaatgagagatgaagaaaataaagaaattaagaaagatgcttagggttttagctccgacaactgagtggaaagtcgctgttcaataaatatttgttgtatgaatcagtaagttaattttaaaaataggaggtataggccaggcgcggtggctcacacctgtaatcccagcattttgggaggctgaggtgggcagatcacttgaggtcaggagttcaagaccagcctggccaacatagtgaacccccgtctctactaaaaatacaaaaattagccaggcatggtagtgtgatcctgtaatcccagctactcaggaggttgaagcaggagaatctcttgaacccaggaggcgaaggttacagtgagctgagatcacaccactgcactccagcctaggtgacagagtgagagattccgtcttaaaataaaataaaataaaacagcaggtgtctttgagagctcgctatgtgccatgctctgttagaattactttacatgggctgggcacggtggttcatgcctgtaatcccagcattttgggaggctgaggccagaggatcacttgaggccaggattttgagaccagcttgggcaacttaggaagaccccgtctcaaaaaaaattaaagtaggctgggcacggtggctcccacctgtaatcccagcacttgggaggccaaggtgggcagatcatgaggtcaagagtttgagaccagcccagccaacatggttaaaccccatctactaaaaatataaaagctagccatgtgtggtggcaggaacctgtagtcccagctacttgggaggctaaggcaggagaatcagttgaacccaggaggcagagtttgcagtgagccgagatcatgccactgactccagcctgggcaacagagcaagactctgtcacaaaaaataaataaataaaataaagtaagataaaggaagtgctttacatgtcctgatttgtttaagccccaaaacaactggatgaggacatgtatttatcatccctggattactgatgaagtaaccgtagcacagagacgttaaggagcatgttctgagtgtcactgctgggaagagaaacaggatggctgggtggatgggtgtgtattcggggatcaatgggtgggcctctgaaaataggcctgtccccgaatcccagcctgttttttccagttaacacttctcttcctcttcctgcccccagcaccacaccccactctggccggagcacgccaagcagctccccatcgctccggaaacggctgcagctcctgcccccaagccggcccccacctgagccagaaccaggcaccatggtggagaagggatcagatagctcctcagagaagggtggggtgcctgggacccccagcacccagagcctaggcagccggaacttcatccgcaacagcaaggttggtgcaagcccaggtggggtggggagagggctagtgggggctggccggtgatctaggggctcatcctgactcctctccttttctttgcagaagatgcagagctggtacagtgtaagtgtctgggcaaggggcttgctggagggctgggaggaccgggtgctgggccaggagccccaggctgcaacagtcaaggagtgcgtgctgagatggagtgggtgcagacctagggtcacgttctatgctattatttatgtgctgtgtgaccttgggtgagttacttaacctctctgggcctctctctgtccttgagaaacagccccaccttacaaggctgaagggaacattgaatgagtcagtgatgctggtgggtgcttggtacggggcccggcttacataagaaatctgtaaatggcagctgtcattgtggctactggtgtgttgtgtgcgttggaatctgtcagggacttaagagactgagggggttccaggagctttgtggggcagcattgggagtgtgaacccccatccaggttctcacctctcaaacttcctcagatgctgagccccacttataagcagcgtaatgaggacttccggaaactgttcagcaaactccccgaagcagaacgcctcattgtgggtgagtcccggacccccagtcccagctcctagcccagccctgtgactctccgccagcccgcgggcgccggctgagcctcgtgacttgggtgtcctcctgtctctccccgcccctctcagattactcctgcgccctgcagcgtgagatcctgctccagggccgcctctacctctctgagaactggatctgcttctacagcaacatcttccgctgggagaccacggtgagcccgcagcggggcagggtacaggggcgggggcccccatggccaggccccaccccgctcctattgaccctcctgctgtcctcagatctccatccagctgaaggaagtgacatgtctgaagaaggaaaagacggccaagctgatccccaacgccatccagatctgcacggagagcgagaaggtgacggaggacccggtgacgggaccacgcggtcccccgctcagcaggccgcctcccccaaacatgcaaagccccatttgttctgcaccctgagttctctccgagctgtccccttctctctgttctcccggcccaggcgcccatcacccctgacctgatccccgcaccagcctctcctctctttccctgcaacctgttacctcacacagctgctcaggaacagcagaaatagtaaaactcttccatgtatgtggcacctcagccgcccctcccttcgtaagtctccccgatgttgtgtcctgtccctgtcattgtggcctcatgtccgttggttgcaagatggctttctcaccagcggtccaacaagaagggggacaggtgtgggggacacttcccagcagacttctctttgtgttttgttggttaaaagtggatctggccaggtgtagtggctcatgcctgtaaccctagcattttggggaggctgaggcaggaagattgcttgagcccaggaggttgaggctagcctgggcaacatagtgagaccctgtctcttaaaaagcaaaaaattaaccaggtgtggtggcacgcacctgtagtcccagctactcactcaggaggctgagacaggaggatggcttgagcccaggaggttgaggctgcagtgagccgtgatcatgccactgcactccagcctgggtgacaaagccagaccctgtctcaaaaaaaaaaaaaaaaaaaggatcaactgaccattcttagtggcaaaggaggctgggcaagttccctgggctccccccatcacatcccagcccctctgggctgaccctgtctagagatgcatctgtcccctccttggactgggagctccaaggacagggccaggggtcgtctccccatcccagtgattctggaattgtccagggcagggccgggcgcaggacagacgttttgtggaactaatgcaggggtgaattagtggattcatggggccaaagatgtggcgtcagcgcagatgagggtggcgcttccccacctctgtcctggtcgctccccaacctgctcacacctctctctctctctctccctgacagcatttcttcacttcctttggggcccgtgaccgctgcttcctcctcatcttccgcctctggcagaatgcactgcttgaaaaggtgggcctgggtgaggcccgggtggggatggggggtttccagggggaccatggagccagggaccccagaacttgcggagctggaggcagccctggctcttctccatgggcaccaggcccagtgcccctgcagctcctccctgggccccacctgaccccgaagctgagtctctggcaaagggacatgaattggtgtaaaccgtcgtaattcttccctggggctgggaatgattttcaccctgaaggacatccaggttccactggcagcgggggagtgtggatagaggctgggaggtcatcacaggatgccggctatggctggtccacagcacctcagagagccccagccccatcctccggctgagcggcactcacgcgctgccttctcagaggctccgatgtccctggagcaggcaggagtgctgagggtcccattcagcatcctgagagagggacagcgcacagtcaggccctaaggaggacagggcagagccccgggattccagccccatcccctggggcaagtgattgaaccccatctgtcaaatgggggccatccccacttcacagcacccagaattttgcccagaataagtactcagtcatgtcagctcttatgagcagagtagcccagcggttagctccctcgccaccccctctgccccccggctgtagaccagctcccctggggtcacatctcagcactgctacttcctggctggaccccagcatgtcaccttgcacttctcagcaccattgtcttaaaaggatgatgaggttagcacctactttccagatggttttgaagatacagtgagttagtacatctgtaaagtggttagaagaatgcacctagttgaccaggtggcaaatgtctgctgctatcatcacttactgttaactgtcatcactgtcattcagccactctggccatgggtggctgaaagctcaaggctcccgaggacacctgggaaaagattcggggggccacgatggcataggcatgggagactcagccctggagtctggcagggcttgaccaagtcacttggtgaccttgaacacatgactttccctacatgacttccccttcctgggactccgtatgctctgtaaagatgggaacattcatggctgggcacggtggctcatgcctgtaatcccagcactttggtagacgaagacgggcggatcgtggtgcccacgaggtcaggagttcgagaccagcctggccaacatggtgaaaccccgtctctactaaaattgcaaaaattagctgggcgtggtagcacgcacctgtaatcccagctccttgggaagctgaggtaggagaatcgcttgaacccaggagggagaggttgcagtgagctgagatcacaccactgcactccagcctgagcgacagagccagactccatctccaaaaaacaaacaaaaaaagatataaaaaaaatgggaacattctctggccagagtattgtggggacttgggaagcaggaagtttgagtcctgggcgcaggccctggaggggctgtagcaggggattccccgcttgctgaggccaggtctggtgcgggagatcgtggctgcctccttgtggaagccaggggaactgcggaggccgagggctggtggggaatctggcgggccgggctctggctggggtgagatggaggccaaccccaggtcccgcctccccagacgctgagtccccgcgagctctggcacctggtgcatcagtgctacggctcagagctgggcctcaccagtgaggatgaggactatgtctcccccttgcagctgaacggtctggggtgagttggaggtcaaaggaggttgaagggttcgggggagaacaggacggtcggcgtgcagagttcctggagtgctggggggcctgagatggttgtatgacgtctggaggattcaggagggtgtatggggtctcaaggacacagcagtcccgcttcctcccctttcccacaggacccccaaggaagtgggagatgtgatcgccctgagcgacatcacctcctcgggggcagctgaccgcagccaggagccaagcccagtgggttcgcgccgtggccatgtcacgcccaacctttcccgagccagcagcgacgcagaccatggggtgagcggtgggttggaagaggggtgggatactgataggaagagagaggagggctgggggtgcagtgggagaagaacagcctgacagatttggaggggaatggatagggggacaggggaggcctggatggaggaacaggacagggaggggaagacggacatgtgacagggaaagagagacagggaagagaggggacagacagaaaggatgagagacagaagggatgggagatgggtggatagatgaagcagcagacagacagacggacaggacaggtaagaaagcttatggctcaggcatctgagacaagcctggcaggggctgagaggggccctcatctgggtggccccaggctgctcgcagctcagccgtgagccctcggtgcacacaccaccccgggtctgcacaggctctggaatccttgtggccagtgtggacttgggagccctggggctgggatggaggtggccaaggctgcatcgggcctttctccacaggcagaggaggacaaggaggagcaggtagacagccagccagacgcctcctccagccagacagtgaccccggtggctgaacccccgagcacagagcccacccagcctgacgggcccaccaccctgggccccttggatctgctgcccagtgaggagctattgacagacacaagtaactcctcttcatccactggggaggaaggtgaggcaggcgggcccaattcattcgcctccggtacttgcaagcctcgctcagtcttaagcaagaggggatggattcgcccgcagcactgagaatccaggggcaggcgggatggcgttcaggcgctgttgctagaaatctctgtctttactctgttttgaaggcagcatggcagggtgaacacaagcacagactgaaggcagcttgccgcggttcacatcctggtcacaccacttcctgaccatgtcacgtgggcaaattatgtaacttctctgagcttgctttcctcctctgaaaatggggttaacaatgataatacccacttcataggattgttgttaagagactataaatgaggctgggtgtgatggctcacacctgtaatcccagcactttgggaggccaaggtaggaaggattgctagaggccaagagttggagaacagcctgggcagcaaagcaagaccccgttttgtacaaaaaagaaaaaaaagaaaaaactaggtgtggtggtgcacacctatagtaccagctacttggcagaccaaggcaagaggatcacatgaggccaagagtttgagacaagcctgggcaacatagtgagacccctgtctttacaaaaaatttaaaaattagccaggcatggggtcatgcaccctatgtagtctcagctactggggaggctgaggcaggaggatcgcttgagcccaggagttggaggctgcagtgagctatgattgcaccactgcacttcggcctgagcaacagagcgagaccctgtctctaaaacgaacaaagggagagaattaagtgatttcatacatttaaagcacttgggccagttagtaagcattgactattagtatttctattatcattattgtattcattttctctctccactaattttcagctagcctctattcttgtctcttatggggcagagatggcctcagccctgccccagaccagcccaatgagagagagcagcctatttttcctagtgtctacagcggacaccctagggttggctctgattgggccaacttgagagtgtgcctgcccctgaaccaatcactgtggttgatcggatagacctgggccacccactcacccctgaaccaattgctgtgcccctaggttgatgctcccaggaggcgtgctatctggtaatgaatccctgtgatttaaatctcagggcctaggtgtgttctccacccagaaccaagcacagtggctgtctgtctgggcctggagcacgtgcccaccctcaacccatccctgagtcacaggagggctctgtgtcagtgtccagctgtgctccaggaggtggggtccgcccatgcacactacaaggcctgggagtggggaggcgtggcccgcagagggagggaggagtggaggcagtcatcatcctcggctctcctctgtctccagcggacttggctgccctgcttcccgacctctccggccgcctcctcatcaactctgtcttccatgtgggcgctgagcggctccagcagatgctcttctcggactcgcccttcctccagggcttcctacagcagtgcaagttcacaggtcagcgggcgcatgaaggagaggctgaggttacccaggtgcaggggaggggtgaggaagggtagcccaggacaggggaaggcactgctagccagtggggcaaggcgaggtggtgaaaagcaatgtctgtcagaccagaagcagctctgccacttactagctgggtaggcttgggcagagttctgagatgctctgtgcctcagtttctccttctgtataatgggggtatgataatagtacctggcttattggttatcatgagaactaagtgagttcatactagaaaagttcctagagcaataccatatagtaagcgtttaataaatacaagttaagaggctgaggcggggctggtgcggtggttcacacctgtaatcccagcactttgggaggccgaggtgggcagatcactagaggtcaggagtgtgagaccagccagggcaacatggtgaaacctcatctctactaaaaatacaaaaatcagctaggtgtggtggcacacacctatagtcccagctacttgggaggctgaagtgggagaattgcttgaacctcggaggcggaggttgcagtgagctgagatcacactgcactccagcctgggtgacacagccaaactctgtctcaaaaaaacaggggcggggggtggggtgctgggcacagtggctcacgcttataatcccagcgctttgggaggccgaggcaggtggatcacctgaggtcaggagtttgagaccagcctggccaacatggtgaaaccccatctccactaaaaatacaaaaatattttagccaggcatggtggcgagcacctgtaatcccagctactcaggaggctaaggcaggagaatcacttgaactcgggaagcagaggttgcagtgagccaagatcgtgccgttgcgctccagcctgggcgacagagcgagactctgtctcaaaaaaaaaaaaaaaaaaggtgggaggagggccaaggtgggaagttcatgtcagcccagaagttggagaccagcctgggcaacataatgagactcagtctttacaaaaataaaaaaaaaaattagctgagcatgatgctgcccacccgtaatcccagctactctggaggctcaggtgagagaattgcttgaacccaggaggtggaggttgcagtgagccaagatcatgccactgcacctcagcctgggtgacagagagagactccattaaaaaaaaaaatgctcctgaggcctccccagaagccgagcagatgtcggcatcatgcttcctatacagcctgtggaactgtgaacccattaaacctcttttctttataagttactgagcctcaggtatttatagtaatgtaagaatggcctaatacagagctcctcagcctgacacgccagcccttttaggacataagcatagttttgggggccttgtagccccccaacacaaggcaccatcttcctgactgcaggggatactgcatgtctcatcaatacagaaaaagaaacaaagagaaactcccatctgacacgctcctcccctgcttgaatctcttttgtagcctcccaagttccttggctggtcccatgtcaacccttcagcctcacccagagctgtggctgcccctctccatacctggctgccccatcccagcctcaggggacttctctcaatattggcctccagcctcagggcctttactggtatcacgcggcctcctgggctcctctgccccgaccccttccttcctcagttcctccttcaggccttggttttgatttcacatcctcctggcagccttcccttaccttcctcagatcccagatacccccagatactcacagcttctgcccttaactcacaccatgccagtagtgtgtggtttttatttatagatatttcctgttgttctcaagagattctgggtgctaaggacaggagttcatctatcctggtctcccactggcctccaagccctgcataggcctgacagagtggacattaaatttgtgatcattaacacatatttatttatttatttatttatttttgagtcaggttcttgctgtcgccccagctggaatgcagtggcacagtcttgagtcactgtagcctctgccttctgggtttaagccattctcctgcctcagcctcctgagtagccgggattataggcgcccaccgtcacgcccagctaatttttgtatttttagtagagacggggtttcaccgtgttggccaggctggtttcaaactcttgacctcaggtgatcctcctgcctcggcctcccaaatttcccgaagtgctgggattacaggcgtgagccactgtgcccggctgcctcagggagcttttgatcatgctgaaaggcaaagggggagcaagtgagagagagtggaggggaggtgccacacacttaaatgaccagatctcggaagaactcactatcatgaagacagcagcaaaccatgagggatccgcccccatgatccaaacacctctcaccaggccctacctccggcattggggattacaattcaacatgagatttgggtggggacaaatatccaaactataccaaactcagactctgttctaggggtactggggagccatggagtgttctaggcagagaagggatagagtcaggcttggctttaacaagatgcccctggaccagatggggagactgaggccagacactcaagggaaggctggcaggggcactgggcaggcaaagatgggctgaaccaggagtgacgctcaggaggtttggtgaacacacagtgtaggtaaccatctaggggtttgagtagggggtgtccagggcaaggcctaccgctccagtgggagcctggaggaccctgggccacccctgagtgggggcctgggagatgcagcaggtttggggagatgctgaggctgtgtggagctcggtgggttcgaggggtccagggaccttccaggggaaggtgttcaaaagattacaggtccaatgctcagggcagaagccaagacgggtgcagagggggaaactgaggctgcagcagtggaggagatggccctgccccaacagctaaggttttaggctcctggaaggaaggtggggacacagaggagtggtggggattgggacaggtccccagagagacctcccagaaggctgagtctcctgtggcctgtgggcaaaggactggggtgtggcctcctcatgctgctcctccctcctctagacgtgacgctgagcccctggagtggggacagcaagtgccaccagcgccgggtgctgacgtacaccatccccatcagcaacccactgggccccaagagcgcctccgtggtggagacacaggtgggccaggtggggcagccgagtgggtggggcagctgggtgagtggggtggccctgacttctccggctctgtccctgcagacgctgttccggcgcggcccccaggccggcgggtgtgtggtggactccgaggtgctgacgcagggcatcccctaccaggactacttctacactgcccaccgctactgcatcctgggtctggcccggaacaaggcgcggctccggtgagtggtggctgggcccctccacccgatgccctggtggccccagggcctcctgtccactcctcaagtcagcagcagagccttggttcccaccctggtggaggaacagaagcgtggggttcctgaggcccttgtcctccgaatagtggagggtagaggaagagtggccctgggatggctcctcccatctacagagggtgtttgagcctcaagactctgaggatacagcaaagccaggcaatatcacctctctcagggagctcatattctagtggggaattggacaatagagaaatgatcaggaaaatctgcagaacattcactggcagttaggcctatggagaaaaatgaggaaaacacggcaggctaaagaagcagggtgtggaggcttttacacccgacacgctggtcagggaagggcctactgggaaagaaatgtttcaccaagaacctgaaggagctgagagcaactcatttgggacagcaggtgcaaaggccctgaggcaggggtgtgggcaatggctggagtggagtaagattgagtgagtaggagctgagattaaagtggtgaaccggggcccggcacagtggctcacacctgtaatcccagcactttgggaggctgaggcaggagtatcacttgagcccaggagttcaagagtagcctgggtaacgtacggaagccctgtctctacaaaaacaattttttttaaattagccagggtccaggtgcagtggcttacgcctgtaatcccagcaatttgggaggctgaggtgggcggatcacttgaggtcaggggttcgagaccagcctggccaacatggtgaaacccatctctactaaaaatacaaaaattagtcgggggtagtgatgcacgtctgtaatccctactacttgggaggctaaggcacaagaatcacttgaacctaggaggtggaggttgcagtgagccgagatcgggccactgcacttcagcctgggtgacagagtgaaactctgtctcaaacaaacaaacaaacaaacaaaaaacaagttaaaaaattagccagacatggtggagatttcagtgagccatgatcacaccgttgcacttcagcctgggcgacagagcaagaccctgtctcaaaaaaaaaaaaaaaaaaaaaaaggtgaaccagatgtggctcatggtgaagacttgactttacctggagtgaggtgcaaccaggccagggctctgagccaggagggcgctgacctgactcaggtggtcccaggctccttctggctccctctgttctggtgggaacagactgcaaagacaggtacaggagcagggaggccagggaggaggctgctgggacatccaggctggaggggacggaggctgaatcagggtgaggaaatggagggggaagagtttagattctggagagattttgcaggtttagctgacaggatttgctgagagattggatgtggcggtgagggaaagagagctcaaggaatatcccgaggcatttggcccaaatcactacaacttcggagctgcccttgacccagatgggggcggcagggaggaatgggtttggggaaagaccaggaggtcagtttgggactcagctgtctatgttgagctgagcccatgtggagctggggtgcagcagccgaatggaagaggttcaggggcatggtctggttaagacgtcagtctgtgagtagacagggctcaggccgccgggagcgttgcccaggtagtgggcatgggtggagaaggaccgagggctgagttggctggcatttgggctgggcgggtggtgtatggggtatccagggaagccatggggggtagggaacccatctgttttgtctgtgagtgacaaggggccctctctgaattaggggaaggaaaaaactcagcttgtgggacggggcagccagggctggagtcagacccttacctccttcccctgatctcccaaccccagagtgtcttctgagatccgctaccgaaagcagccgtggagcctggtgaagtcgctcattgagaagaactcgtggagcggcattgaagactatttccaccatctgggtagggacagaaggccggctggggcgtgggttgggggatggcctggccaggtatggacatccagagccccctctcttttacgcagagcgagagctcgccaaggctgagaagctgtctctggaggaaggcgggaaggatgcccggggcttgctatccggcctgcggcggcggaagcggcccctgagctggcgggctcacggggacgggccccagcacccagatcctgacccctgtgcccgggccggcattcacacctcgggtacgttccgttggggccgggttggggtaggcggaggatcgggggtcctggactgggccatctgactccaagctgctctcctgcaggctccctcagctcccgcttctccgaaccatctgtggaccagggccccggggcaggcatccccagtgccctggttctcatcagcattgtgtgagtaagagacaggagcagtggccacacaggcctgaacctgcctcctggctgtgtgaccttgggcaagtgtgtggcctctttgagctctctgcttaagtgggagcgtgggtttgctcacagcaaggattagacaaggcaatgtttgggatgtgccggtttgtcatggagaagccttccctgctagaacagcagagccggggggggctatgggagatcagaggggcctgacctcacccaaggatcaaggggggctttctggaggagcaggcacacaaagattctggaattaggtgcacagggagaggtgtgcctaacaagtgaggtcatttatggacattatgttctctgtgcccactcctaagctgggcgatgctgaggacaccgcagtgaccttgaggaaaagatagacctcacaccagaccagagtgatccgggctgggatgggggaggtatgggcagaggggttggggctgggagtggggaagccctgggaggccagcggcggcttcctcccaggccagagggggcagtcaggatgggcgtcctgagagagtggagaccgcgtaggctaagggcttgggcagggagaacccacactcctgcccagaagcctgcaggagttggcgggcaggacgctgggaggaaacagaagcaggatcccggggttgagcagaccctgcgaggtgagggtcaggccagctacatgctcagcctctgagcctcagctctcagctctcatccagtgagggggcgtggtgctctcagccaagagctgccccgggtgaggagggctgggggtgtcgggggcaggccaggcggcgctcatctctctgtctcccctcactgctgctgctgcaggatctgtgtgaggtagggtcccgagtcctccccctgccctcccctccctgcaccccacccctgctgcagcctcttctccccaccccatgccccccagctcccccagggaggtggcctggcatggcagtcaagggtatgggcatcagacagacctgggtttgaacactgacttccctgctatggactgtgcaaccctaggcatgtctctcatcctctctgagcctaattctcctcctctgcaatgggggatagaggtgtccctacaagatgtagttgtttgggggtgttcagagcatctagaccccaggaatcctgacctctgacccctgtccccagccttatcatcctcatcgccctcaacgtcctgctcttctaccgcctctggtccctggaaaggacagcccacacctttgagtcctggcacagcctggccctggccaaggggtgagtgggtagcctggggaaatgggggggcttgggcacatcgggggaggccaaggccctgctcaggcctggcatccccacagcaagttcccccagacggccacagagtgggccgagatcctggcgctgcagaagcaattccacagcgtggaggtgcacaagtggaggcagatcctgcgggcctccgtggagctcctggatgaggtaggaggcgccgctcgggcagggctcggggctgcggggctgcagggtcctgtgttgaaaccccaccgtgcggcaggcacttcccctctccggatctcagtgtcctcctctgtaaaatgaggaagccgctcagagtccccaccccacagcattgcaggggaaagcatggaagcatggatggaagacagaactgattggctcacgtcctggagaaaagtccagaggcgtctcacattaggcacggccgggtttggtcactcaatggcagtaagagtcagtctctcgtgcccactctgccctgtgcccatctccagggttggcttcattggaggccacccttttccccccacaggggaccacggagcttactctcattggctgctggggtcccaggcctacccctgacacatcacaacagccagggcaggccacgtgtggtccctctacccgctaccccactctggggtaactaaggggtcacatggtctgaaggggagagactctccaaaggacctgaggtctcatctccaaaacggagtggacccagacacccagtgtagttcagggacaatgtctactcagacaaccaggttccaattccggtgtgtgacctcgtgcaagtgattttgccatggtggccgtggactcctctgtgcacaggataatgactgatgctacctcaaagactgttgtgaggatgagacaagttgacattgggagtggtgccaggcctgcaggaaacactggatgtgggctggctgtcctgagtttgagcctagtgccagggacaaagcagatgcccaataaatgtgatgtcatcacacgacaattccctcaggccccagtagactcaggccagcagttgcggtgggtcagagcaagtgtcaggccagcagttgcggtgggtcagagcaagtgtcaggccagcagttgtggtgggtcagagcaagtgttaggcactcggggaaggtgtcgagggggaaagcggatgggaaacagagtctggcattgcctgcatttccaaggccatcagagctgaagttgtgggtgacggtgaaaatcttgtctcattggacccttccatatcagaaggctcatctttaggggtctcattgccccccgaaatcaagcttgggagaggctcacactggaaagggcggggcaggatggggtggggaggagatgaaggctgaggccccatcactcatagagagggtaggcagggccccccatcctgcgttattttattttattcttttgagacaggatctcattctgttgcccaggctggagtgcagtggcacgatcatggctcatcgctgcctcgaactcctgactcaagtgatcctcctgcctcagcatcctgagtagctgggactataggcaggcaccaccacacctggccaattttaaaattttttgtagagaccagagtctcaccatgttgcccaggctggtctcaaactcctggcctcaggcaatcctcccgcctcggcctcccaaagtcctgggattgcaggtgtgatccaccacgcctggccctgagttaaatttttatcattttcctctctgtcaaactgctaagggtgcagagttgacgtcacagattggtgctcacagtagatgtagactgagcacttacctgcagctgggctgttctaggttttaagcatgactgctttatccccacagccagcctttgagaagatgctcttgttatcccagtttttttgagacagtctcgatctgtcacccaggctggcgtgcagtggtgcgacctctgccttccaggttaaagcgattctcgtgcctcagcttcccaggtagctgggattacaggcacccgccaccacgcctggctaatttttgtatttttagtagagacgggctttcaccatgttggccaggctggtcttgaactcctgaccttaagtgatccaccggtctcagcctcccaaagtgctgagattacacgcatgaggcactgtgcccggccgttatcccggttttatacataggtaggcgatatgaggcatccagaggttcgaggagctcaggagcttgcccgaggtcacagagtgggtaatggtgacagctaacatgtgctgagcacttagtgtacaccaggttctcagtgctcttcagaaccctgaaataatcctgtggagcagatgtgttatagacccgtatttcaaatgaggggattttggctcagggtggttacgggacttgcctgaggttaactgaggtaacaagcagcagagccaggatttgaacctaggccatcggggtcacaggcacacactaagccccttcctctgctgcctctgagaagttaaactgggtgcagcatggctgtgctcttttcaccaagggaccctggggtggggcagtatggcctctagaccgtcctcagtttctcaatggcaaggtgggggtgggcgacatcaccccccagcctccagcgttcacccccgaccctgctcacctcctccccgcagatgaagttctcgctggagaagctgcaccaaggcatcacagtctcagaccctccctttgacacccagccccggcccgatgacagcttttcctgaggaccccggccacgcagctgttcccccacatggacagatggacacacagagcctcggcggccactgctggcacggtgtgagcgccaggcatctcccacccgcccctcccgacggcccaaccaggggctgtgcagacgtggggaccacggaaccgagatgcactttagaccagggagctggcccggcctctggcaggccccccactaacttattttgcccggctgaggttgtggggggcgcctcctggggtgcacgattccctcagctctgggtttaatgtattatatttatttggggccgacagtgccccaataaagggtcagaagtggc

SEQ ID NO: 132 - DNA, 9260 bp, Homo sapiens
ctgagctgagtgacaggaagacggttcaatgggcggcgcggaggcggagccgtgggggcgggctcccggtcccgctatcggcggccggcgggcaggcgactcctgtcccgggtggaggcggcggagccggagccgggggagggggcagcggctgtctcacggaccacggcggcgcccgcagctcctcaccggtgagggcgccaagccaggactcgggggtcccgggagcggggcgtcgtgaagccagggctcctggtgttggggggttgggacactgagggcccgtaggctctgctgccttggggatgcggggccccggggtctgcagggtgctcggagtcctagaccagggcttggctgtcacagggggcagccagcgtctgagtcggggaggggaggggaggggagggtcgagtcggaccggaccagattgggttctgtggggcggaggcatctgtgagcagaccagccagccagcgcgggtgacatcaccgaccaccctcccccgcccgagccccctcccctcctctcctcgccgcgccttttgtcccggccgagctccgctctgccccgcccatctgcgagggaggagactcccgtcagtgacttcattgagtaggttcttggggattggggtcgggtcctccccagtgagaggcgacaggagctcactgcctctcgggccctcacaatcacacctgtcacaggtatacacgctgccactcacaaacacacgcttgcactcccagcctcactgacacgctgccatacagccgctcacagccagccagacactgctgcacctgagagcaggtggccgcgggtcttctcccttcactctccacatttggggatcaggtccggcacctgctgcgccagacaggccttgctgggcacgcgcctctgagagtccaaggaggtggcttccagagctgcagcacttcaggccggctccggtggagcgatcagaggtgaggggcttggctgggcatgtttaagcgcacagtgctctcctgcccacccccagcagcacccccactgcaggcccgaggagctttccggagcttcccacactcctggggagaagacttcttagccagcttgatgtttaaaattcagctggagcccttaaaacttcgagcgtggacgctgaatgggtttgtaaagtttcggtaagtccctccggagaagggcactcacacccatacccagtcaaaccctccacgcggccatcccctccattgccttcctgcttcctccaactcatcctcatcccctctgtgacatacaggaacccccctccggcctcacccacatatttgaatgaattgcaccccttatcattccttttctcaaacccttcaggtatccattttccacagacatttcctccattatttcaactctccacattcctccctttcaacccatcattaacccattttccacctcagccatttccatctgtcactcatccccctccatcagtacctcattttctgtatcagccatctcccctccctgtacctcaacagtccccctcgccattttctccccatttttccttcctgcctctaccttaacatcctcctcattcttctccatcaaaggcagtgccatgccatggggctcctttgtcattccaacacgtggcctgtgggtaggggggaagggaaggagggaggaaagcagaaagagaaaaaggaggcagatcctgaaagagcttgccctgtgtctgcggaggcaagagatgtatgggcctagagcagctagcaggtgggtaccagggaggaagctggccgggtgtggaggtaatgcagggacaccaaaaggaggtgggtggttggtgagccgttccactggccctctgcctggaagctgctctcgttctctaggggcaccctcttggtgtgctagggttctttcccagtcccaggggaaagaaggtgtgggttgaggcagaaatggcagaccacccccccccgctccctctcagacggcttttgctgccatttccgaaaacggttgcccccccccccaacgaggtgctctttcttctctgcctctcccaaccccaccccccaccccatctcccccacagacgtgacatgctggtggggggcaatgggggagtacccgcctttgtggagccttttcttcgtcagagaaaggtgactcccagaaccatgagtcaacccagccacctgcagcagggcctgtgggggcagcagtgagggccattgtccctgcccacctagggccttgggcgcctcccccttacccggttacaggcctcactcctggaaggacaccctgtacacctccctgctgtgaagcagtcagaggcagaaaggcaggtctcagctgtggctgccagcctaggacattgctagaaagactctggttctcctggctttggcaggggttggccaagtctcagaagggctgagaatggcttctggccatcccccagagagctctagctacaggaaagtcccccttcccctgatatccaccacagacacaccgatagagggagactggaatggaagaattcgggttgtacgtttctcttataacaaatgctcctgcacccaccttaaaagggactcagaggaatatgggtctgatgatgggccggatcctaaaccacagggtggactgggggcgtagggtgaggctaggagaggtattaaggaaatggtggttggttagtgcccaattgtctcctaacagctggggttgaaaaagtcctgtccccaggatgcttttgttcactcacactggtgcttaggcggcacagccctcacagttttgtgtgtagacgctggcaaatgagtaaagggaactgttgccctggttgggggaaggatagtgtcgccccccctgctaatgagggagttggaaacagcagtttccaaaggctgtgagtcaccctgtgatctgagtcacacgtgaggcttagcatcgtcagaggggtgggggcggggaggcctggggtctccgatggcagacaggactccagacacccattccctgactcagtctggctggccaggacagctggcggaagacccaggcctgttcccggtcctgggccactgccccagctgccctcagcctgggcaccatgcctgaggcgtggcgtaggagaccacgatgctcaggtgacctcacccgttacactgaccttcgccagctcctgtgtgtgggtcgctcagtccatggtgccacctcgctcagcagggcctctcaggggtcctcagtctggcccaaggaccagggcctcagcctagccccaagagtgggccacaaccttcagcttcctgctgggaaaacccaggaggtgaggacggaatcacagaattctagaatgtcagagccagaagagatcatctagtccaaacctttcattttacagatggggggacgcaggcccacagaacaggcatgacctgctgaaggttacccagggagtcatttagggattgcaagatcatcaggaacagggctggggcagaagagaaggcatcaagtcttggccctgggtttctttcagaaacaaggagaccagtgctggtccagtggctgtgatgggaaaagattattacaagattcttgggatcccatcgggggccaacgaggatgagatcaagaaagcctaccggaagatggccttgaagtaccacccagacaagaataaagaacccaacgctgaggagaagtttaaggagattgcagaggcctatgatgtgctaagtgaccccaagaaacggggcctgtatgaccagtatggggaggaaggtaagagggcagcactccagcccaatcccggacccctccgcttggtaggggtcccaggtgcaccagtttgtgtagcggggaactggaggctgtggagggggtgagggcagcaagggtttccagcactgtcacccagagaagagagaagcccacccactacccagctcagctcaccctagttctccccgcctctctctgccccctccctcctcgggttcaggccttagagaggtctgaagcaagagccagaggccttccccgcccttctttccttcccagccttattagtcctgcctgaagtctccgctgcttcattggctgatgaggaaggttggggagagggagtgtgtggctctctgaggacagagcatttacattcatcagcataaaagtctggcccttaagcagcctgggaattaactaccagagctctgagcagaaatggttttccccttctctcccccggccctgcctgcttctggccagcagaacagaggtggagctttgcctcccagaggaagtggcagggatccaagggtggacggggaactgctgctggcatcttcccccttccctggggtagctggtggccatggggtgggaggcaggaaaggcccaaataaagcctctgagagggaggcccctcccagcacatcccacggccatgatgtagctgctaattctgggcctgcccctcagggctgcctgccacccgccagccacaggcacctgtcaggctatattaagagacattgtcacgctgaggactctccttcctgggaagaactgtccttcctccccaacagaatccacctttctttcacattctcctcctcttcaccctcccctttctatcctcaaaactaaatgggctaatcatatgtagataagaaggttattttcttcccctcctcctggccttgtgttccatgcccctctgtgaaccctcatcctcccaactcccttttcctattctccatgctgccggttccttccattcttcctgcctacctcctagacgtgccaactcccagattcaccagataccggctggaacccccagtattctttcagctaagacatttttctctctggcatggagggatgggagggataggagtggaaaagagggaagcagtgcagacaccatgccaccatgtgacctgtcttggaattgcacccattcctccattcagcctcacctttgtttagaaagaaggcaggagctgggagagctcccttgagatacttcaccccttctgcctaagtgaaggggtccagacaccaggttctgatgcagaaccccatcccaggaaggcccctgaggatgcggcatggccttaaggggacctccatggcctggggagggagaagcagcttagaaatgttggttatatttctgtccaccctgcccaatccccagcagccatttattatagagcagttatacacacagactctgtgtgcagctccagctagggacaagttgctcccagcttgaaaagggggtggtagtggaagaatagaaatccctatagagagaattaccccttcccatcatcatcagtccagcctccctccctctctcactgagctctgccaggctgcttgaactcgcttgataatcagcccctcgatagaaggaaaggagagatcctaggtcttgggggaggggtgaagaggcagctgccacaagtccctgaaccgtctgccacttggcctctctagtgaaactcaaatctgcccttgtggtcccaggaaataagaggctaatttaggctcagatctccatgatcagttgaaattctagataaatggcctcaaagagaagggtctctttcctagcctggaccccacccatagtctctgtattccggagcagttctcagtgtgaaccgtctccccacatcccccactactgccagcaccccctcctgtgcatgaaggctgcctccaggaatctgagccccttagacaggacctgacagagagagcagctaaggtcaccactgccatgtgccagcccattcatgcattttggttgctcaacattaggtgtggggtatggcgtttgctgttgtataactccagggagctccattcccattgtagtctatgtctgtacaatgtgtgaatgacactccctaaagttgtgtaacaccgagcagagtgtgggaacaaagcatttaaaaactttttctagaaaaatagctcttcatctccaagctaatgagctttcccactttttaaggcttcctgatttcccgtttgagcaggggccagggaaagaggaaacactgctagaagcagagtgaaagtggtcttcctcccgggttggatccctagcctatttgcgactgttcacttaccagccccctctgtggtcacatcctgtctgatggccccttgtcctatatgtctttggagataagcaaagatttgggaaccaagtatcacttgtaatgtgacaccaggctagtcattcaaggctttttgagacatctttggaccatgagtatgtggaaaagattacaggactggaagtcacatcctctaagtcctctagtcctggcttttccacctattgggtaagcaagcctctttgaatctcaagttgtgcatcgttattaaatatataattaggaatggaagataatcttgccagaagcctttcttactctattagcctggccctctctgtgggatttaaaggttgcttctttctttaagcctgtgaactgggagctagagggcagggggaagacactgggattggggccagaataagccacactgcccctaacttctcctcccctctaggcctgaagaccggcggtggcacatcaggtggctccagtggctcctttcactacacctttcatggggacccccatgccacctttgcctccttctttggtggctccaaccccttcgatatcttctttgccagcagccgctccactcggcccttcagtggctttgacccagatgacatggatgtggatgaagatgaggacccatttggcgctttcggccgttttggcttcaatgggctgagtaggggtccaaggcgagccccagaaccactgtaccctcggcgcaaggtgcaggaccccccagtggtgcacgagctgcgggtgtccctggaggagatctaccatggctccaccaagcgcatgaagatcacaaggcgtcgcctcaaccctgatgggcgaactgtgcgcaccgaggacaagatcctgcacatagtcatcaagcgtggctggaaggaaggcaccaagatcaccttccccaaagaaggcgacgccacacctgacaacatccctgctgacatcgtctttgtgctcaaagacaagccccatgcacacttccgccgagatggcaccaacgtgctctacagtgccctgatcagcctcaaggaggtggggcctagtcaggctgtgtgtgtgtgctggggagatggtggggacattccctctcttcccgccagctggcacattctttccccacctcagtctatttccttccttcccactcaccttaccccaccttttcctcactttctgcttcgtctttcccaggcgctgtgtggctgcactgtgaacattcccactatcgacggccgagtgatccctttgccctgcaatgatgtcatcaagccaggcaccgtgaagagactccgtggggagggccttcccttccccaaagtgccaactcagcgaggagacctcattgttgagttcaaagttcgcttcccagacagattaacaccacagacaagacagatccttaagcagcacctaccctgttcctaggctctgccccagccagtccagagcctaccacagcaatacccccaacactcactccactcaatgtgcacccagcttgatgtccactggacactggcaactttttctaaaatgcaaaaaaaagccactggttttcaggaaaatgttcctgtccctgaccccttttagagctgggctgcctggggggagtgggagggaggtggggagagctagcccaggccaggggtcaatgttcatgtcactagctttcaatccagtttccactgcagtggctggagagtgacctgagtgctacttgaagatatgtagagattccttatccatgcctgtacatagcatgtcctcctcccctcagctttgctaataccagtcccctcccttccctttggcttcctgctgttgggggtggaaaagactagaaaggacattgctttctcagccccacccccaggtccacagtgtccaaggtaatggcacacatattcatgcacaagaagcactcacctagagctgtctgtgcctctctgggagaaaggagagaggataagaagggaaagttcacaacctgtgaacagggacttgagcacgagacacttttcatctggagcaggggggtgagctcctcagcagcctccgtaacagctgccctgcctacacctgcagagctggaggttctgtcctccctgctgctctcaggagtgttcaagggtggagggcagggaatggggcctgaggtattaaggctaagaggtgggggacagggcccatctaccagccttcatcaggaagggaaagggctttggggtcaggtggcagctattccccaccaagagattcagggtcacaggtttttccccacacctctgaactcagggcctagccacccccaaacttccaaatcccacttttgtgatatgtgaagctactcatttcttacccttggaggctgtgtggggaatttccagcccttttatgcctgtgtgatcccaccccacccccatagttgtataaaggtcatagtgaagaagctgggggaagactgcttcagccagatcctggggtggggtctttaggttttctcactttgacaacccccgaatgtttttatagtagtttttttgtatttttttgtaatgacagtattatgtaaaaaataaagtattttaaaaatatggcatctgagcaggagcaacaaacctgggatgggggtggctgaggagggccactgtcatcctccctcccgggctctggtcacctttgagaagcccaagcaggccctcagtataagctgaagctgacctctgccttcctcgaagcctcctgggatttctaaaacttatacttcaaacacagcacagacagaaagtaccactcagctattagaagaaacatctatttgggaaggaaaaatatccctgctcatgagagacagagaccattgtcttcagatgtgctagcatgaaaacagattttctcttcttgtctaaattttctctgagtcagacaaattttccttctaggagaaaatttttttctaggagggggtggagaactttttttttttttttttttttttgacacggagtcttgctctgtcgcccaggctggagtgcagtgatgcgatcttggttcactgcagcctct

SEQ ID NO: 133 - DNA, 163550 bp, Homo sapiens
ggctgcgcccaggccggcgggcccagcagctgcgaaccgccggcgcaccacctgtttccgcgcccggggacttccccggcggggctcagaagtgtgggatcggtcgcttggcttcccctggcgtcagcgacccagggtaacctcctccactgctgcgtgccgtgcaggcctgcctgtgtgagagccacgtgtgccgcgctctgggcacagccttggaaagtcaggaccgcgacggcagcagagcagtgagtggaattaattctcaagtagagcatttaaaaagtgcttcattgaagagtttgaatctcagtcactttgtagattctgatatctagagtggcaccgtccaacaaaaatataatacaagccacatatgtaagcttgatgtttctagtagtcgtattagcaaatgcataaagaagcaggtggagttaattttaatagtatattctgtttaatccaatgcatccaaaatattatttcaatcaatatcaatgctgaatgttttatgtcctttttttgtaccatcttcaaattcccgtgtgtttgttacacttgcagtacatcttacttccaactggccacattttcaagtgctcaacagccccatgtggcttgtgtctattgtattggacagtgcagctctagaccagtacccaactctagtgtacctggaaaaatgtacccgtggtattgagttactaggagaggaaggcttatttcaggaaaaggtcatgtaaatcttctgtcagtacagccggtgttgacattcaagctgaaagggtgtatgtagacaccgtttaatgtctacattaaaggcctctggcttcggtgttaacttgtttctttaaaagcttgatactgttctctgttgcagcttgttttttaccctcccgtcttcattttcaagggcctggtattgtcttcaaatgcatttccatttttggaaagcagagtcgtaaagcattaataatgtggagattatttagtccatttcatgcatgaggacacaagcctgcagcagccgagtaaacttgcttgttgtttaaccaatggcaaaaatgggatcagatcccaagtctccctaatgttgagttattcgttgttttcactgtgctgcatgacctcattgaagtaaaatatcaccaaccagaacctaaccatttttcccccgggttgtttacaagggattatacacgattaaactgtcaatttcttttctgttcaagtagagtcatctggggttgctcaaagttggagaaatcagtctatatacttctgccttagtaccaaaaaaagagaggtgcaatatttatttatttttgaaatagggtcttgctctgttgcccaggctggagtgcagtggcatgatcacggctcactggagcctccacctcccgtggtcaagtggtcctcccacctcagcctcccaagtagctggtattacaggtgtgcaccaccatgccccgtgtattttttttatttttattttttagagatggggttttttccacattgtccaggctggtctggattcctgagctcaagcaatctgcctgccttggcctcccaaagtgctgggattactgatgtgagccaccatggccggccaagagttgcaatatttagtaaagctcttccgactagttgaggcattaaaagaaagcattatggaaaaaaaaagtctactggaaaatagttgaaacaaaatctattgaggcagtatgttaaaacccacagacctccatacttaacccagtattgatttcatcccactgttttctttagtgtctgctcatggatcagttttttcttctttacaactgacccacccatatagtacactactgctgggcactctgagacccatccatcctcagatgctgagccggtgggttctcagcacagtgctttcagtgtcctatggttatccagctgtttcgtagcagcacagactctcttgaactgtaactgtcaatagataacattttttttctcttgtgtaactaaagggaaaaaagtctataactcattcattcattcatgtattttttcattcaacaatattcatggagcaccgcctactgggtgccaggccctgctcaaagccttgggaatacagcagtgaacaaagaactcctaccctaatacactagtggatgagacagagagtcaaggagtaaacagatgctttattttattttatttatttttttgagacagagtcttgtcctgtcacccaggctagagtgcagtggtgtgatcttggctcactatatcttctgcctcctgggctcaagtggtcctcccgcctcagcttcccacgtagctgggagtacaggcatgtgccaccatgcctggctaatttttgtagtttttgtagagaggggttttaccatgttgaccaggctagtctcaaactcccaggctcaagcaatctgcccaccttagcctcccaaagtggatgctgttataacctaataacagcaaagtaaatggatagaaacaagtaccattttgaataggatagacaggaatgcctccctagggaggtggcatttggaagtgatcaaattgaagggtcacactgcatacacatctcagggaagggagtaccaagcaaaggaaaccacaaatgctaaggcctgaagcttgcaacagtaagaacaattccagaaacagtaagagaggctgggcgtggtggctcacacctgtaatcccagcactttgggaggctgaagcaggtagatcacctaggtcaggagttcgagaccagcctggccaacatgacgaaaccccatctctactaaaaatacaaaaaaaaaatgagctgggtgtggtggcgggtgcctgtaatctcagctactcaggaggctcaggcaggagaattgcttgaacctggaggcggaggttgcagtgaggcgagattgtgccattgcactccagcgtgggtgacaagagcaaaactccatctcaaacgaaaacaaacaaaaaaaaaaaaaagaaagggccgggcgtagtggctcacgcctgaattcccagcactttgggaggctgaggtcggcggatcacgatgtcaggagatcgagaccatcctggctaacacggtgaaactccgtgtctactaaaaatacaaaaaattagccaggtgtggtggcgggcgcctgtagtcccagctactcgggaggctgaggcaggagaattgcttgagcctgggaggcggaggttgcagtgagccaagattgcaccactgcactccaacctgggcgacagagcgagactgcccccccaacccccccagaaaaagagccagtgaggctagtgtagcaggagcagagggaaaagtaatagtatccatcaggcagttcatgcagggcccattgctaaggatttagttcagacttgtgctgtaagaggattactgtggctgctgtatggaaaattaaggtgggggtggcgtgttccaagagtggaagcaggcaggccagctagaagactactgtaataatccagctaagatgatattggcttggatcaagggtcctggtgcagttggcagaagcagtcagctcctggatatatttagaaaggagagccgattggatgtgtggaggagtgggtttgaggaggatgatccagagttctgctgaggacactttaagtagaagatgcctagttttatatccatgccctgccatgcgggcagatataaatcaggagctcagggacaaagttgggactaagaatgggaggtgccagtgcagagagggtgcttaaagttttggttgaattctagggtgtataagttgttagggaagttagcgtgcttgttcttgagttgctggaaaggcatataaatgacacaaatacatggccacaatctgtattttctcaataatatttggtgaaatgttctgggcatcaggtttcccgtctaattttccatgtaggaaatggatagtcattgaagtagttttgatttgggtgagttgttacatggaaagggaagttgtaagttctcttgccacttttcttgttctgcacctttagagagtcattaacgagaactgaacactagggggacccagtttccttacttatgcaacggcggctggcccagctgtacgctacgatcgccctcacttaggacacatgcaatataaacacaaatctgaaaacaagggcagcttctcttttatcaatgcaatgtatacttatagcagtgatcatttttgcgtgtaacatgtctgaattccttaaataggtcattttaagtaatgtgcataaccattactatttttcttttatgagacagggtctcactctttgccaaggctgtgtgcagtgatgccatctggactcactgcaacctctgccttctgggctcaagtgctctttctacctcagcctcctgagtagctgggaccacaggcatgagccaccacacctggctaattttggtttcgccatgtggcccaggctggtcttgaactcctgggctcaagcaattcactcaccgtggcttcctgaagtgctgggattacagggatgagccacaacacctggccacggtttaaagaattaaagacaatggcttctaaactctagttccctattggtgagccccatatttgcaaacttgtgaaactaaggatcatgatttcttttttattttttcttaatttttattttttgagatggaatcttgctctgtcgcccaggctagggtgcagtggcgtgatctcgactcactgcaacctccacctcccaggttcaagtgcttctcctgcctcagccccccgagtagctgggattacaggcacgcaccaacatgtccggctaatttttgtatttttagtagagacaggatttcaccatgttggctaggctggtctcgaactcctgacctcaagtgagccacccgcctcggcttctcaaagtgctgggtgggattacaggtgtgcgccaccacgcccagctgaaggatcatgatgatttctgatttacaatagttgaattggagtatggaaatctaaatgtaataaataccacctggtgatttgaatctgcgccacaagaatgctgacatagaatccattttctgttttatcaccagatattaagcaaagggaaaggcaaataaatgctgaaaagctacattacatattattggagtataaaatgtataactttgttaaaaggtttggacacattttgtattagttacggatacataggtcttaaaagagtacatggtctcaactcttttttttttgagttggagtttcgctcttgttgcccaggctggggtacaatggcgcaatcttggctcaccacaacctccatctcctggattcaagtgattctcctgtcagcctcccgagtagctggaattataggcatgcagcaccatgcctgtctaattttgtatttttagtagagatggggtttttccatgttggtcaggctggtctcgaactcccaacctcaggtgatccacccgccttggcctcccaaagagctgggattacaggcgtgagccactgcacctggcccaactcatttttataagtagaataattttacttttgggtagagaaagtctacataaggtttatactgaaacctcttgaagtcaacaagcttaaagcagaatctttttaatcaggggaaatgaaaacataattagcggcctggtgtggtggctcacgcctgtaatcccaacactttgggaggccgaggtgggtggatcacctgagatcaggagtttgagaccagcctggccaagatggcgaaaccctgtctctactaaaaatacaaaaattagctgggcgtggtggcacatgcctgtaatcccagctactttggaggctgaggaaggagaatcacttgaacccaggaggtggaggttgcagtgagcggagatcacgccactgcactccagcctgggcaacaagggtgaaactccatctcagaaaaaaaaaaaaaaaagaaaaaagaaaacgtaattaacaaatgtgttagctataatgtcgggcacggtgactcatgcctgtaatcccagcactttggaaggccatagtgggcagatcacttgaggtcaggagttcgagaccagcctggccaacatggcaaaatcctgtctccactaaaaatacaaaaactagctgggtgtggtggtgcacgcctgtaatcccagctacttgggaggctgacgcaggagaattgcttgaactctggaggtggaggttgcagtgagccaaggttgtgccactgcactccagtctgggcgacagagcaagactctgtctcaaaacaacaacaacaatgaaaaagtgttagctgcttgatctttcctattttggggcagttatgatctaagaattactttgaccacaatgaatcctttcccatgggtcaggatgttagttctcagagctttgcttctggcggtactgacctgtgccggtgttacagatgtgtggtgaaggggctggaaactgtggtccacaggccaaatccagtccactgttttttttttttttcagcctgagagctaatagtgtgtgttgtttttttttttttaacatttttatgtgattgaaaaaaaatatatttcctgtgtgaaaatcttgtgaaattcacatttcagtatccgtaaataaaattccattgaaacatggccacgttcattcatttatatattgtctgtggctgcttttgaccctcaatggcagagttgactagacagaggcctcatggcctgcaaagctttaaatatttactatctggacctttacagaaaaagtttgccaacccctggcatgtagagtctgtgctgtttacttacaggttgcaacagttcttggaatgactctgtaactggttgtggtctttaactatttgcctttatgacttttgataggcttactctggctaccatgatatcatttcattcatgtatttttgattaataattaaattccattgatgctttcattcttatttcaattcttagatgaaaatatgcttcttcatttgattatattgtttaatttttatttccctcttctgttattcattacttaatacttcccttgaattatttagtctttttctaaggtgctttaaaatagttcgtatgaaactcaacataaaataaaatcgtcctgttttcaatgatcaaagtatatatatgtatatatatgtatatatatacttttttgtataaaaagtatatatatgtatatatatacttttttttgtataaaaagtatatatatgtatatatatactttttttttgtataaaaagtatacaaaaaaaaaaagacataaaaaagtttaggctgcacatgatggctcacacctgtaatcccagcactttgagaggccgaagcaggtggatcacctgaggtcaggagtttgaagccaacctggccaacatggtgaaacccaatctctagtaaaaatacacaaaattagccaggcatggtggcgggcacctgtaatcctagctacatgggagggtgagacaggagaatcacttgaacctgggaggcggaggttgcagtgagctgagattgtgccattgcactccagcctgggcaacaagagcgaaactccatctcaaaaaataataataataaatataagtaaataaaaagttcagtagaaacttcttgggaaactttatgtgtctctagtagagttaaaaggttttgcagaagataaacgttaaaaaattatttatttggagtgaatctttggtgagtttttataactttaattgcctcaaacactgaatgctgtgagagtcaataaaaaatcttagaagagaatcggtctctttaaataaaaaatccataaatttattgcaaatctagaagtaccagaatgtcactaatacagaacagatcagcaatcttgtttgtattttcttccaaacatttaaaaccttgattattgacatactgaaattggcatacattttgttttcatgcagataacagaatagacatggagcagatccctcagaaatcagttataaatattaaattgtattgaacattcatagtaaaaaatatgtcgtaaagtgctgaagtcatgtaagtctgcaaaactgccacaagctcaaagttctcaagcagtgacagagatttgctacatccaccttgttttagattatgcctgtttttgacagacactttgtcatttcctcccccaccctccccaaagttttatagattgtcctatttctatggctgataagatgctctacaaaatgtagcaggtggtgatgaactatgccactttcatttcagtgcagagaaatattcaagcttgtgtgtacctgtaaccaaactaggcttgttatgtttttccccctgagttgtcataaattaacattaacgatgaataaagatggagcagcaagcattgaccatcacctgcagggtgagattgtggtaaaataggtgagtaaaaagtccacctattatcctgacacttgccctccttacagaaaactgctaacgtgagcaatactatacatgtagtgtgactccaaaaaaaaaggaagaataaaacaaacaaaacaaaacaatgaccagttacccgatacctctggcaacttagaccaatcaagtcatgtgttatagaagatgtaaattgcaacttgtaactcgctataacataattgtctctgttacccccatgtgaaatacagaaatgcttcaataattagatggttttttctttaaatcagaaatgctttaacaattctctgaaatataattctgatcaaagaagttcctcaagtattcttaaatgataaaacaaattagttttgaaagctaaggcgatttgcaatccattattttttcccctttaatagcacacgttgcccctaatcaaatggaagaatcatgacaacttggccttttatgaaagtatttttacaagataagacgtattctgtgaggcatttaaaggattgcagaaaggaggtaaaaatgctgcttatgtctcagattttatttcttttgattactttaatcatcctagaataacttaataataaatagcggtttaaattaaagacactacagtcacatatttctgtataactaaaagcaacaggaaacacatttttaaatgccattttgtatattctgtactgaaacacttctgataaggactggccataaaaagaagtggtaatcttcacatttatgaagttcaagttatatatatatatatatacttaaaatttgtttattagtaaaatgtttggtcttaaactatatttcatttccagcaagcagaggccgtaatttgttaacgggaaccttggtattttacaaagggtttaacaaaaactatttattcatatttctgaaaattaggaattttaaaaatgattgaagtctttttttttttgactggccaatttcatttcaatgacctgggttggatgttgttttattcaggagagtagtttattcagacaagaccataggaagaaagaaaagaaaaaaagaaaatcatttatcccacgtgaaagcttttaaaaccactttgccagttcatgtcactattttaatatcggaatgtgaaccaaagagtctttctacatatctcttgtattgctactgaatacagccagatttatatatggaagagtgcttggttgttttttgttttggctttaaaaacaagcaaaaaaaaaaagcttaaaacaaaacaaaacaaaacaaaagcgatgttggtagtgctcttcacatacacattccctttaaaatgtagttttgaaagtggagtagaggggttagctcctctgcctccttgtgtccccgttgggcccaccccatccctctccagccaacacagtggctgttgttgtaagaaagtgtgtcataccggctccatttgcacgtgaactctgtgctcattttttgcaagatccatttccagaaagtcttcaggtatgtcctgtaaagtcttcccacgatggctcactacctttgtttcacctgagtgatgatgctggcacagtcccatcttacacggtctcaccagggcgaggcacacagcagccagggccatgccagctgcgcaggagtagaaggccctgctgtagatcttactttggtccaccaacaaacctggaagagagcatggcgtccgttaacagcatccttcctagacataagcccctcacccaggcgaccatcccattcagaagcctctcagtttcactgccttccttgttttcttttgtgtttctaaagaaaaatgggtgttaagggcagaaatctttactagactggagaggagaaagagacaaacacccaatatacttgttcttcttgggctaagcctgtcctagcagaggacctaaaacctgggacatttcgatgcatacttctttgaaaaggtaatattcttcggtaggaaggaactgtattattttcacttgagttcactttaggttttttttttttttttttagacagagttttattcttgttgccccaggtggagtgcgatggtgcaatctcaggtcactgcaacctctgcctcccaggttcaagcgattctcctgcctcagcctcccgaatagctgggattagaggtgtctgccaccatgcccagctacttttgtatttttagtagagatggggttttgccatgttggccaggctggtctggaactcctgacctcaaatgatccgcccgcctcatcctcccaaagtgttgggattagaggcatgagccactgcgcccggcccgttttaggtatcttttgacagggggtacgatttctaatcacaaacactttaaagacccatttgggatctaagatatgaaacatacctatgtccctcctacaaggaaatattctgtacaaatcagttaggtatttacagagtgctgctatccattcccaaatacctttcctaagaaaggaagatgacttacagaagtccattagttctatcattccaaaagtcaggtgggctctgaaggtgataaatccatgagttcttgcctagcatgagagaaggcaaggtgacagaaaaagcctgggttggcgggtgcggtggctcacacctgtaatcctagtactttgggaggccaaggcaggcggatcacgaggtcaagagattgagaccatcctggccaacatggtgaaaccccatctctactaaaaatacaaaaattagccaggcgtggtggtgggtgcctgtagtcccagctactcaggaggctgaggcaggagaatcacttgaatctgggaggtggaggttgcagtgagctgagactgcgccactgcactccagcctgggtgatagagcgagactccatctcaaaaaaaaaaaaaaaaggccagggtcaatctggactacagacacagcttccagtcctgaatcgaccactaatttaccatctgacctttagcttcaattctttggccttcagtttcctcatatttaaatcaagagggctggctcaggtaatctctaatccctggcagctctaaaattcaatggaaatataaaacggcagtaagttttttttatggcttgaacaggaagctagcacaattcacaagggaaagtagacaagtgtttgtattttgtgtatttaaattacctgcaaggggcggtccagccagtcctgctatgctctgaatgaagatgtagaccccagctgcagaagacatcttctcaatgcccacgacatcatcctcagcaagcagtggaatgtgagtccctcctattgttccaaccataaacccaaaaaatatgctgcatgacattagaccccagaattcagtagcaaaagtaaaggcaaacagagacacagtcaataagatgacgcagatgagctcaatgtaaatcttacgaatgggctccctgttgaggacaaaaccagctccgatccttccgaaaacttctgcaatggccatcgtagataataaaaaagcagcgcggtcctggtcaatgcccagactaatgcccagaggaatgatgtacaaggaaggtgcaaagaatcccagtgttgcaaagagaccaaataatgcataacaaataaaacttttctctttcaaaatggagaagtctaatagcggggctttcttttcgcttggcctggggctggtcttcaccaggacctgctgcatgtcggccttcggctccagttccaggttagtgtgagtaggcacatttttaggtgaggtagttagttctactcctgagtcaatggagtctattgaggttcgtgttttctcattttcaagcatatactgcgcttctttccgattttcctggatgactattttcggtgacgctggtcctctgataaagatgggtctgagcagtgctccgaagatgacaatgtttaactgtagtaggcccacgaagaggaggctgtatctccagccaatgcgctccttcagagccatgattgcttgaataggcaggagtgaagaagaaataatataaggtcaataatggactcaagacccaggagaagccatcaagaagaaatatggatccagattttgttataagttctgtggaaatttattatactcagcagtatgaatgtactcaatctttatttatttactttttgagacagagtctcactctgtcaccaggctggagtgcagtggcctgatctcagctcaccgcaacctccacctcccgggttcaagcgattctcctgcctcagcctcctgagtagctgggactataggcgtgcgccaccacgaccagccaatttttgtatttttagtagagacagggtttcactgtgttggccaggatggtctcgatctcctgacctcctgatctgcctgcctcggcctctcaaagtactgggattacaggcatgagccactgcacctggcctttttttgtgtgttttaagtagagacaggtttttgccatgttggccaggctggtctcgatcacctgacctcaggtgatccgcccacctcagcctcccaaagtgctgggattacaggtgtaagccaccgtgctcagttacagattttgttttgagatgatctacacacagataagaatgctgtgtttattagcataatctaaatccacattgaatgtagctcttttgaaaaacgagaggacataacaggtgaataattgcaaattactagattattctggaatgcatgtgtcaagaaagccctaccactgcatatgtgcccagttaggaattgaaacctattattaaggtggtctgaatacctaaagtgggggttagggaggacagatcctaaaaatgagctggagaagagacgtaaataacgtctcattacacatacactgaaagtcatccatactgttggcaaaagttagcgtagcaagaatacctgagtgacgtctctcatccacattcatacttaggctgttgtagtccacctacctggtgcgaaagcaaacacagcgaaacattctcctgtggaagcaactgcagtgactatggaacgtcttttgccaaaatattgtgataggatggttacagttgggagaaaactaaagcagtatcccagacctgtgaaagaaaagtcaaaaaagccaatgagacccacatactgcttgagactggaaggatgcattaaaagatctgggatttttggttttgctttttgaatcttaagttctaggagccaagtaattcattctggacaaaggtgatgttgcaaagaaaaatgggtttcattaacggtctggataaacttcagtggttgtttgggatactaaaaatataactttttttttttttatctttgcaacactttttttcaaatttatataattcacaatggatgaaactattattgcatgaaattttatataagatttgtatctagaaagaaataagtcatttcatatgtgcagaaatacaggaaaaatttaaagtctgcaaatcttaacaactgtgtgtgtatctatcatctatgaggaatatatggcctccttttattgttcatttcatttttttttttttaaacagacagggtctcactctgttgcccaggctggagtgcagtggtgtgatcacagctcactggagccttgacctcccaggctcaagtgatcctcccacctcagcctccaaagtgataggatggttacagctgggaccacaggcacgcaccaccacgcttggctagtttttattttttgtagagatggagtctccctatgttgccccagttggtctcaaactgctgggctcacgtgatcctcctgtctcagcctcccgaagtgctgggattacaggcatgagccaccatgctggctactccttttgaatggaaaaaggttttcttaggcccccaagaataagtctggcatgttgcacttcccctacagccctggatcctcagacactgatgtgagaaatactggctacagaaattcgtcttactttgtaaaaatgctatcttttggctgcaaatacagcaaaagagaaattatcatcatctttggtgaagatcaaacaaaaacccttgggcacttgagaacagattcccaggtcccctgaagtccatatagctcagttcaaaactactgatctgagacactgttaatgttaaagaaaaaaagaaagagaaagaaatatagtttggctttaatttcctccttccccttccttgttcttcaaactaagtgtctagacaacttctgagccaaagaggaacacttaccagagatgatgccgatggcgacgtacatatgagaaacctcttgtgagaaggaggcggccaccatcccggtgctgacaagtagcccccccaacatcactaccagacggtgtccgaaacgattgctcaggactgtggcgaggggagctgccgggaaagaacaaaacgatattttaactcacagaggcttcagggttagctgccataagactccttcctccacgtcttgcacatggagagatgatgtcgaatataaatatggccgagcgcagtggctcatgcctgtaatcccagcactttgggaggttgaggacggaggatcgcttgagcccaggagttcaagactagcccgggcaacatggtgaaaccccgtctctacaaaaaatacaaaaattagccaggcatggtggtgtgcacctgtagtcccagctacttggcaggcagagatgggaggattgtttgagcctgggaggcagacgatgcagtgagccaagattgcaccactgcactccatactgggtgacagagtgagaccctgtctcaagaaaaaacaaaaccaaaccataacacatttcatgcaaagtcagtgcaggaattattttactatttgttcaaattcaacacgatttgtcagactcctgaaagagaaagccagaataacagtataaaacttttatctatatttttagatgactctgactcaccatgagcacctataaaattagatatgtattgaatttatgttattctataataaaaattggttttcctatgattgcttgaattattttttctctactcactactttggattctttttaaaaagctccatttggggtcagattctagttagtttctttctttttttttttttgagatggagttttgctcttgttttctaggctggagtgcagtggtgtgatctcggctcactgcaacctccacctcctgggttcaactgattctcctgcctcagcctcccaagtagctgggattacaggcatgtgccaccatgcccggctgattgtgtatttttagtagagatggggtttctccatgttggtcaggctggtctcgaactactgacctcaggtgatccgcccacctcggcctcccaaagtgttgggattacaggcgtgagccaccgcgcccagcctagttagtttcttgacaggatgaaagaatgtgaattctaagttatgcactcctgaaggagagttgctatgggatagataattgaaagtgaatcatcatttgcttagcttctataagctgtatcccctaggacatttaaatctggcaaattagtttcctagttataggttacttaatattaacttgacaacagtgacgtaagtgagccattgagagttgggtcaaggaacaacaacatgctagaaaaggaagtgggaaaaaaaggattccatttttttgggttagtctatatgtatctactatgttaactattagaatacaaagtaatcttggatgtagctcataataaaaccactctcatcattttgagccaggatgttggctcaaagcattaacaactagaataatagcatttggaagaattatcttctggtataatagtattaagtggaaatttcttgttgactacatttttatttttagttataaaagacctaaaacttaagctttgggattttctttttatttagattaccaaatgtaacattttagtcctaattcatttgttatctttctaagaaggtaattaagcattccacaatttaaaaatgaagttatcttggctgggtgcggtggcttacacctgtaaatccagcactttgggaggccgaagcaggtggatcacgagttcaggagttagagactagcctggccaacatagcaaaaccccgtctctactataaaaatacaaaaaattagccaggcgtggtggcaggtgcctgtaatcccagctactcgggaggctaaggcaggagaatcacttgaacctgggaggcggaggttgcagtgagctgagaccgcaccactgcactccagcctaggcaacaaagcgagactccgtctcaaaaaaaaaaaaaattaagttatcttgatactcacttaaaatagaaccaggaatgacttcatgaaacttgtaagggatagtatgagaactaacaagataaatttctctctctctctttttttattttttgagacagagtcttgctctgtctcccaggctggagtgcagtggcacaatctcagctcactgcaacctctgcctcccaggatcaagtgattctcctgcctcagccttccgagtagctgggattacaggtgcccaccaccacacccggctaacgagaaatttctaccttacccaaagggtaaaaacatgtagaactgccttgtaaagacattctatggctaaaaatggactacatttaaagaagggctttaatttcagcaataacttcagagataacagttccatgacagtgtgtaagtgtaaacttagggaagtttaaggtcagcctggttaactttctttattttttttattttttgagatggggtcttgctctgttgcccaggctggaatgcaatggcatgatcatggctcactgcagccttgacctcccaggctcaagcaattctcgctctgcagcctcctgagtagctgggatcacaggtgtgtaccaccatgcccggccaattttttattttaattttttgtagagatggagtcttgctatgttgcccaggctagtctcaaactctagggctcaagcaatcctttcatcttggcctcccagagtgctgggattacaggcgtgagccaccatgcccagcttggttaactttctgaggtgagttcaacagcccttttctcttagaaaacccttggcaattatttctgacagaccaatgaactcatgagacctggcatgtatattcaatagccctttataggaccaagtgaagattagtatgttaaaaatgatactgaagccccattttattttatgcgattgggtctgggagtatattatgtaatgatgaatcagtgaagtcctttagggaaacaggtgcttggaattcagaaggtctcctcagaacaatatttgtaatttcaccttatctccttgtacacatctcattttgcttcatgcatccacatttacatgtttccacttggaattatgagattggggcctggtatgtcagcaattattattattattattttgagatggagtctcacactgtcgcccaggctggagtgcaatggcatgatctgggcttactgcaacctccacctcccaggttcacacgattctcctacctcagcctcctgagtgctgggattacaggcacataccaccatgcccagttaattttttgtatttttagtagagagggggtttcactatgttggtcaggctggtctcgaattcctgacctcgtgatccacctgcctcggctttccaaagtgctgggattacaggcgtgagccaccgcgcccggccgcaacttttttcttttttgagatggtgtctcgctctgttgcccaggctggagtgcagtggtgtgatctcagctcactgcaacctccgcctcctgggttcaagcaattctcgtgcctcagcctcccaagtactgaggattacaagtgcaaaacactgtgcctggctaatttttctattttcagtagagatggggtttcgccatgttggccagcctggtcttgaactcctgacctcaactgatccacccaccttgacctctcaaagtgcttacaggtgtgagccactgtgcccggccatcagcaactttttgatgttgcttcttagacagtgactatatcctcacatcctcacaaaaggaggttgactgcactccttaagggaatctacagaatcctaagagtgtgcagacagcagatgtttaatacatgtgtgttaaactgaaggctgtcatggctggcaaataaggctttttttcttcagtgccttttgtttcttgccaatcctcaatgctctgaaaaccctgttagtcagggctaggaaggaccaacaggcgtataagggaatgaaagcatcacaaacacatcgactaccattaccaaggtagccaaattaaaagggccctatacttacgtcatggttaggccgaaagatgtactaacctgaaaatgttaagacaaacacacagattgagattatccatgagatcctgctattggattcattaaaactgtccattaagtcattaaagaagacaccaaatgtcttgatgatgccgtaggtgaagacttcaacgaagaaaaatgaaacagctaccgcccagccccatcctccatcaggcacttcagtatacacattggctttggaacaaagctttaatttattttgggtcattcttaatctgaaagaaaaagttaaaagcaattcagatcagcaatagcatgaggatcgatgattctcatactcttaagcaaacaacagataagaactacttaccccatttcttaagttgttgaatatttatttatttatttatttattgagatggagtcttgctctgtcatccaggctagagtgcagtggcatgatctcagctcactgcaacctctgcaattctcctacgtcagcctcccaagtagctgggactacaggcatgtgccaccacagccagctaatgttttttctttttccttttttttttttttttttttgagacagagtctcactctgttgcccaggctgcagtgtagttgtgtgatcttggctcactgaaatctcggcctcccgggttcaagtgattctcctgcctcagcctcccgagtagctgggattacagatgcccaccatcacacccggctaatttttgtatttttagtagagatggggttttgccatgttggccaggctgggctcaaactcctgacctcaagggatccacccgccttgacctcccaaaatgctgggattataggcatgagccaccacacccagctgattgttgaatatttaaatcatgtacaagcagtataaagtatttggatacttttatgcatatatatgtatatacaaatcttggtattgtacatggggcctcccaaaaagaaagttaaatgggaaaaacagacatgaagaaccagagcagaatatttagaagcatattgaaggacaccaaatggccaccagaccaagtattaatgctgaccttgaaggactcaacttaggcaaaaaaagactgaattgaccataaggaatgttgatcagaaatgaagcctagaaaacggaggctgaaaagcaaacattggcggtgcatccagcaccttccaccgagtaagtgtttgagataccataagcgtctctgcttgatgtccctggccaccgcgatcacctagtcaactcttcttccccgccattttctactcagtaagcaatattctgattatgatttggtgttccatgtggatgtacctacacagacacaatgtcactataaatcaaaatgagggcattctgtcttctgggagtttgttaagcaggagtaatttcctcaaagttgaccaccacttagtatattagcaattgaatttccaagtacatgatgatactctagaatatggtgtctaaataaggtactattatacaagcctgtagggccccatctggacaccagttaactgagttacccctaacctcactgtgcctctccattcaaactgcaataaacatcagaacaagccaacctgtcttaacacttctaaggagacattgacattgacattggtttaacttaagtcttctggattgggctctagcacatgaatactgtctttttcaaagcctctgtaattacatatactttgaaacagtcatgtgtatttttagcctaactaaaaattaatgatatctataataatcaatgagtccatggtcttcaagctcttaatggcaaccaacttcaagtttaagaattctttatggctgggcgcggtggctcacacctgtaatcccagcactttgggaggccaaagcgggtggatcacctgaggtcaggagttcgagaccagcctggccaacatggcaaaaccccgtctctactaaaactacaaaaattagctgggcatggtggcaggcacctgtaatcccagctactcaggaagctgaggcaggagaattgcttgaacctgggaggaggaggttgcagtgagctgagactgcaccactgcactccagcctgggcaatagagcaactctgtctcaaaaaaaaaaaaaaaaaaaaagaattatttatatatgacccaaagcaatctacagagtggattcctatcaaaataccaatgacattcttcacagaaatagaagaaaaaaatcctaaaatttgtatggaaccacaaaagatcatgaatagccaaagccatcctgaaaaaaagaacaaagctggaggcatcacactaacagacctcaaaatatatgacaacacaacagtaatcaaaacagcatggtactggcataaaaacagacacactgaccaatggaacagaagagagaaccctgaaattaatccacatgtctacacccaactgatttttggcaaaggtgccaaagacattcattggagaaagttcagtctcttcaataaatggcactttgaaaactggatatcaatacaaacaatgaaactaaatccccacctttcaccctatacaacaatcaactaaaaatggatcaaagacttaaatgtaagacctaaaactataaaactactagaagaaaacataggggaaacactttaggacatttgtctgaggaaagatttttatggataagactggaagagcacacacaacaaaagcagaaataaacatgggattatattaagctaaacagattctgcgcagcaaaggaaacatatcaacagagtgaggccagatgtagtgtgtcacgctataatcccagcacttcgggatgccaaggtgggtggattacctgagctaaggcgtttgagaccagcctgggcaacatggtgagatgccatccttactgaaaatacgaaaaattaactgggcctggtggcacacacctgtagtcccagctgcttgggaggctgagggacgaggattgcttgaatccaggaggtggaggttgcagtgagctgagatcatgccacttcactctagcctgggtgacagaaggagactctgcctccaaaaaaaaaaaaaaagaatgaaaagacaacccacagaagggtagacaatatttgcaaactattcatctgacaggggattaatagccagaatatacaaggaactcaaacatcttaacagcaaaaaaactccccaacaatctggcttaaaaatgggtgaacaggctggtggcggtggctcacgcctgtaatcccagcactttgggagcctgaggcaggtggatcatgaggtcaagagatcgagaccatcctggccaacatagtgaaatcccgtctctactaaaaatacaaaaattagctgggcgtggtggcatgcacctctacacctgtagtcccagctactcgcgaggctgaggcaggagactcacttgaacctgggaggtggaggttgcagtgagccgagatcgtgccactgtactccagcctggtgacacagcgagactctgtctcaaataaataaataaataaataaaatgggtgaataatctgagcagacatttctcaaaagacatacatatggccaacaaatatatgaaaaaatgctcaacatcacaaatcattacggaaatccaaatcaaaaccacagtgaggtatcatcttacctcatttgggatggctatgatcagaagacaaaaaaataacaaatgctggcaaggatgcggagaaaagaactcttatacactgtcggtgggaatgtaaactagtacggccaataaggagaacagtatggagcttcctcaaaaaactacaaatataggaacacttttacactgctggtgggactgtaaactagttcaaccatggtggaagacagtgtggcaattcctcaaggatctagaactggaaataccatttgacccagccatcccattactgggtatatacccaaaggattataaatcatgctgctataaagacacatgcacacgtatgtttattgcggcactattcacaacagcaaagacttggaaccaatccaaatgtccatcaatgatagactggattaagaaaatgtggcacatatataccatggaatactatgcagccataaaaaaggatgagttcatgtccttggtagggacatggatgaagctggaaaccatcattctcagcaaactatcgcaaggacaaaaaaaacaaacaccacacgttctcactcataggtgggaattgaacaatgagaacacttggacacaggaaggggaacatcacacaccggggcctgtcgtggggttgggggaagggggagggatagcattaggagatatacctaatgttaaatgacgagttaatgggtgcagcacaccaacatggcacatctatacatatgtaacaaatctgcacgttgtgcacatgtaccctagaacttaaaaaaaaaaaaaactacacataggaccaggcgcagtggctcacgcctgtaatcccagcactttgggaaactgaggctggaggattgcttgagccctgcagtttgagaacagcctgggtaatatagggagacgctgtctctacaaaaaagtataagaagaaattagcagtgccgggcatggtggctcatgcctgtaatcccagaactttgggaggccgagatgggtggatcatgaggtcaggagtttgagagcagtctggccaacatagtgaaaccccatctctactaaaaaaaaaaaaaaaaaaaaaggccaggtgtgctggtgggtgcctgtaaccccagctacttgggaggctgaggcaggagaattgcttgaaccccggaggtggaggttgcagtgagctgagattgtgccactgcactccagcccgggtgacagtgcaagactctgtctcaaaaaaaaaaaaaaaagaaagaaaattagcggggtgtggtgacacatacctgtagtcccagccacttgggtggctgaggtgggaggattgcttgagttgaggctggaagcttgaggcggcagtaagaagtgatcacactactgcactcttgcctgaatgacagagcaagaccctgtctaaaaaaaatttttttttaagttggctggcgtggtggctcacacccataatcctatcactttaggaggtcgaggtggatgggtcacttgaggtcaggaattcaagaccagactgggccgggcgcagtggctcacgcctgtaatcctaacactttgggaggccgaggcaggcgaatcacgaggtcaggagatcaagaccattctggcaaacacgatgaaaccccgtctctactaaaaatacaaaaaaattagccaggcgtggtggcgggcgcctgtagtcccagctactccggaggctgaggcaggagaatggcgtgaacccgggaggcggagcttgcattgagccgagatcgcgccactgcactccagcctgggcgacagagtgagactccgtatcagaaaaaaaaaaaaaaggctgggcacggcggctcacgcctgtaatcccagcacactttgggaagctgaggcgggtggatcacctgaggttgggagtttgaaaccagcctgaccaacatggagaaacgctgtctctactaacaaactacagaaatgatccctgaaagtatagtcttgaaaccctgtctctactaaaaaaaaatacaaaattagccgggtgtggtggcgcacgcctgtaatcccagctacacgggaggctgaggcaggagaatcacttgaacctggaaggcagaggttgtggtgagccgagatcgtgctattgcactccagcctgggcaaaaagagcaaaactccgtctcaaaaaaaaaaaaaaaaaaagaccagcctggccaacatagcaaaacactgtctctactaaaaatacaaaaattagtagtagcacgagcctgttatcccagctacccaggaggctgaggcacgagaatcacttgaacctaggagtcggaggttgcagtgagccgaggtcacaccactgcactccagcctagagtgagcaatagagcaatagagtgagactctgtctcaaaaaaaaaaaaaaaaaaaaaagctgggcgcagtggctcatgcctgtaatcctttgggaggccaaggtaggtggatcacttgaggtcaggagtttgagaccagcctagccaacatggtgaaacccggtgtctgctaaaaatgcaaaaactagccaggtgtggtggcacgtgcctgtagtcccagctgctcaggaggctgaggttcacttgaacccgggaggcagaggttgcaatgagccaagatcgtgccactgcactccagtctgggtgacagagcaagactctgtctaaaataaataaataaaataataaataaaatgtaaaaagaaaattctttacaattatacaattgtatacaggtgaattttcagggtcagggtgcattatatcctttatatccttttcctagccataagttgttgggtcaaagttactaaggcaaaggttttattgaaagtagaaggcaactgaaaaataacaggacacaacctcatctatccaacagacttgctggttttctatttttaaaatctaatgttctgaatttactctacaaatcttaaaaagcagcaaatctgatctaacttagtatcattcatcctactgatagcgccattcccactgtagcctagtacttgggaaggactatatattcactttatacactattacggctaaatatttggttgattaaaataaggcataagatgctgtaagatgagtatgctctttgcagcaaaggcctttgcattttgatgtgtgttgatatgtcataaattatatgctcacaaaatctgaggtctatttctctttgtacaaccccatgtccccggaccctgcctgtaccttgtacacagcttgtatttatttttgcaacaaaatacctatcaggtgccaggtcctcgctttcactataggggcactacagtgaaaagaccaagagatggtctctgcctccatggactaaaatatttgctgatgatgatgctaaggaaaatgaatgcatctgaaatgcatcctatgtaaatgattcaaccacatcttgccagagttcagcacatttctgacaagcagtcaggactcagtagctactaagaccaaggtcaaattggcacagttgttctaacccagaaatgtgcccagaaggtcttaagagttttaatggagggctcaggaccaccttgaaacaaaacatatagtgataaaatttgataaagaccctagagagacgtggagtgcagtggcacgatcatagctcactgcagcctcaaaactcctgggctcgtgcagggcacggtggctcacacctgtaatcccagcactttgggaggccgaggtgggtggattgccttaggtcaggtttcgagatcagcctggccaacatggtgaaaccccgtctctactaaaattacaaaaattagcctggtgtggtggtgcgcacctgtgcttccagctactcgggaggctgcggtgggagaactgcttgaacccaggaggcagaggttgcagtgagctgagattgtgccgctgcgctccagcctgcgtgacaagaacgagactccgtctcaaaaaacaaaaacaaaaaaactcctgggctcaagtgaccctactcagcctctcaagtggctaggactataggtatgtgctaccatgcccagccaattttttttttttttaatttatgttttgagatggagtccaggctggaatgcagtggcatgatttcggctcactgccacctccatcccccaggttcaagcaattctttgcgtcagcctcccaagtagctgggattacagacgcccgccaccatgcccagctaatttgttgtatttttagtagagacagggtttcaccatgttggccaggccggtctggaactcctgacctcgtgatccacccacctcggcctcccaaagtgctgggattacagatgtgagccaccgcgcctggcataatttttattttttgtagagacagggtctcaccatgtggaccgggctgtgggttgcatttagatgagtgggaccagattgcagtttttgtatgagctgagattacctgccatcatgagaaggctctgtctggccagcactgaagttctggtgccagctgcccctttcctctcttcccttgcctgtatcatcagatgtttacacttgcaaaagggatggggctaggatgaatctgtaacccctgaatagagttagaattattgaatgttaaagctgaaggggaaaattgaggttatctttttcaattcctttttgtaaaatcttactcattttgtaaaatcgggaaactgatccccaagaggtgaagggacttgactgaaatagcccaatactgaatctcctgccttccagggctcctgctgtacaagcctacaggagagcattttattgtatttaatttttttgagatggagtcttgctatgtcacctaggctgaagtgcagtggcacgatcttggctcactgcaaccttagcctcccgggttcaagcgattcttctgcctcagcctcccgagtagctgggattacaggcacccaccatcatgcccggttgatttttgtatttttagtagagatgaggtttcagtatgttagctaggctggtctcgaactcctgacctcaagtgatctgcccgccttggcctcccaaagtgtgggattacaggtgtgagaaacagctgatacttttgaatttagtactgaattctattaatcaactgatggcttaagcgaagcctggtggcccaaggaaactgagctcggagaaagtgtaaatgctagatggttcttgcaaacatgggtgtaaagtagctagctggtcattgcttagatctattctatgacagctgtttagaagatggtggactttttgtttttgtttttggagatggagtttcgctcttgttgcctaggctggagtgccatggcacaatctcagctcactgcaacctccacctcccgggttcaagtgattctcctgccttagcctcccaagaagctgggattacaggcatgcgccaccatgcccggctaattttgttttagtagagatggagtttcaccatgttggtcaggctggtcttgaactcctaacctcaggtgatctgcctgctttggcctcccaaagtgatagtattaaacgttagatagtatctaaacgatagtgctgggattacacgcgtgagccagcatgcccagccttcttcttcttctttttttttttaatagagacagggtctccctatgttgcctaggctggtctggaactcccggactcaagcgatcctcccacctcggcctcccaaagtgatagtattaaacgtgtgagccacctcacctagccagatggtggactattcatttctatttcctttctgagccactgctgggaagttaattccttagtttttttaaaaaactctgctttatgtctgagctattctactctagctagagccacatataactttcacctgcattcttgggtttttggacagaagctttcttttctttttataactgagatctccatcaaggaaagatgacaccctgaaccccgtcctacccccaaggtttatgcctttatcatcctaaagcatcctatgtcctattaaatttagctttgaagataagaccacaatataaagtaataacaggataacctggtttctgaaccttcctgggtgataatgcctgtatttaagtaaagtcatgcacaggtctttccttaaaaaaccgagtcataaggggagaaagtgcttggttgcagaataaaacccttcctggactcttctcccttttttcttttctcttctcttcttctcttctctctctctttctctctctctctctctccccctccctccctcctttcttttttttttttttttgggggttggggatggagtctcagtctgtctcccaggctggagcacagtggtgcgatctcagcccactgcaagctctgcctcccgggttcaagcgactctcctgcctcagcctcctgagtagttgggattaaaggcgcatgccaccacgcccggctgattttttttttgtatttttagtagagacagggtttcaccatgttggtcagactggtctcaaactcctgaccttgtgatccgcccgcctcagcctcccaaagtgctgggattacaggcgtgagccactgtgcccggccttctccttttctttttttccattccttcagcagaaggccaaaccttctgtctctgcaaacaaagcaactgaggcctgaattttgaactcatttatgcagaagcctctgtaagttccagaatataaaagtttatctgtccactttggtctgtggccatgtgaatttatctgacgggtagggatatttttcagctgtgtagggatctaactggtgaggcgagctgagtcatcctgcccatcaacccctgctttacggatgatggaatttaggcaaatcacttcacttccccattttcaatgtcaatgtaaaatcaaggtaaatgtaaaaaagggagttgaactagactctgatgagcttagatctcttcctgccctaatagtctatacttctatgacagcctttgaccgtcacttgctttaatccttctaagccctttgaaggcaaggccgaagagttggtcttcttaaagctcttaggccatatttgttaatttctgtgtaccattaactggctgcacagttatggaaaccacagaatcctgaacttctagaacttctatcatctgtaaagcatgggttgtcaggggagtctctcaagccttttccaacttacaaaactcgacaattctgaatgggggttcccggcagccatcttcccttcaccctagtgttcttctggaggaagtacaatgacacaatccacgggcagtttggaggatttcctagtagcatgtggttaagtgtccccttaaataaatgagtattggccgggtgcggtagctcatgcctataatcccagcaattagggaggccgaagcaggcagattacttgagcccaggagtttgagaccaacccgggcaacatagtgaggctgtgtctctacaaaaaaattaaaaaatgaggtgggaggatcgcttgagcccgggaggtcgaggctgcaatgagcagagatgacgctactgcactcccatgatgggagtgagaccctgcctctaaacaaataaataagtaggtatcttgccaaaggcttggaaatccgctatccttgggagtttcactgtgatttaatttgtcgagagaagatttggcccgagggcatgaaaaaaattgtattattgtagaccatcagagtgttattccagggtcagctaagagcaagtttcaaaacgcaggctctggatggaaatggggtggctactgttgtaggcagacctcgagcaaaagcactgcggatttctcttcttcttaaaggcgtagcccggagaacagctttgacaagttgtttctggcccaagttgtcaaaaccagtctgtatttggctaaagttcatctgcattctctatttaaaaaaaatttccaaacctaacctggatagctgcctcacgatgttgaatcactggctacaaccgagtcaccattttacaagactatggtgttgaaacctgagcccctaatttaagtgtcctcctcaggagttccactgaggaaagtcctttttcggaaaccacagaaggaaaactcagggttagtggtactcattacactggaaggagcttttccacttggctgcattgtttatttacacactgtaagttcctattttggacactcttcccttaattatgagaagaggggtttctattatatcatctggccggatgtattgttgaccccaaaaatgccacataacggtgcttgggacatggggagatgcatggtttagagatttcagcataagcacttggcatcttttttacaagcaagacacctatcttaccatgatttgcaaaaacaatcagatcactgagaaatctcattcccggggtagaaaccatctcctgcgagaaggagctggcacggagtgtctaaccgtgcaaacaaaaccggcttccaggttgacaagttgtaattgctcttccccagttggctccggggagctttttctaagactgacgccccccatgtttggtgacattttatatacgccacctaacaaacttctatgacctgtcttgctagggtggggggaataaaaagaaaagacgacaacaacctagaaggaaataacccatttcctctgcaaaaccatcttcccttgctacggaactgcttggcgacaccagcgctttcctgcggttggcagcccgggaaccttgaagttgcgcgggaccggccgtcagccgctgacagttctgacagtccaggtggaggacccgcgctctgccgggaaatccccggcttcccgctggggacaaacggtggccgccgcagggagtgctgtgtttgggggtcgggggaggcagggagccccactttccctcgcgctgcctcagtgcccggcctgcgtgcgcgcgccagcctggggtaggaaggtacctctgacatttcgctcctgcgacgcgcaggcaacttcatgcggaaaatccgcggaggggctgagcctggagcccccgactcttccgacgtcccggagcccccaacccggggcagggggcactcaaaggccaggcgtgcctttaggtatcttccgggacccaactgtaccagggtcacggacattcaactctcagctacccacaccggcgcgagcgcgtcatcccggtggccctgggcattcctaactgtcagagcgaatatttttgggaataacctctccaaaatgtgaagatgttcagtggtctcctccgcctcccatcacaaaaaaaggccccaacacatattttttaaaaaacaacccacatcccacaatcaaacttttaaacatgtaaaataataaaccaactcaccaagttagaagggaagagaataaacccccaaaggctcccaataaggcggaggcttggcctccccctccttataagccgctcggtaacatgagaaaaggattaaccccttagggggcgggcccgactctagcgcaagttggctcgggctggtgaggcccgagcgcccgggccctccacccactcccgcgactcgggcacccgagccacaccctccccccgccccccaccccggccgcctgcgacccgggccgtgcgtgctgccgcccgcgccccggccccgcgtcgctgcctagctcttatcctataccggctgcagccggtctccgccggcctcgggggcgcgccgccgccgaccatgtgctgcgagcgctgagcgcagccaaggagggggcctgcctggcgcgcgcgcgccgtcccacgtggacctgagccgcgccggtcgcgcgcccgccagcctgccgcctgggctgggggtcacgaaaggtaaccgcgtcgcggtccggggccgggccgcccccgccagcgccgccggggtccttggcacaacgccccgatctcccaacccgggtgcgcctctgcgcgcgtgacccgcccagaccccggagctttgctgcaacgctagtaggagcgcgagcgtgcagggtgttgggggtgcctgcatcctgtctcggagcacctcggccaggcgcgagcgcgcgggtccccgtccccacccccgggcgccttcccggcgcgcccaccgcccagtcccgcccgcgccctgaggatttagggatttagcggcgagggggaacacgcgcgcgccggggctgatcccgcgcggcgctcgcggctgcggcggcttcgcgcccgccccgggcagaacaggttccttccagtttgggtgtgagctgcgcgcgcggcgcctgagttcctcctgcagcgcccacttcccccagtttcgtcaactcgcgcacccccacagttccccttccggcagtggggagggagtgtcgcagtgggccccagggagcgagcggccgggccgctgcgggtgccttgcttcccccactttgctgcaccggcagcagcggcagcaacagcatccgcgttgcgcgaaaggaatgtgagcagccgggctgagtcagcatccccggcccggggcgcgcgcgcaccctccaggcagtggcggcgtcggcacaggtgcatggctcccatacccgcggggagccctctgtaagggacctggaggtttagacagtccgtgcccctcatcccgtagtccccgaccccaaggtcaccgtgaactaagcggatgatgcacgcgaaatctcaggagctcctcatggggacaaagcatgtgtcagatcctagacatttcagagcctgcgggggcgcaaacttagcttcttggtctctacctcacatcccgagggcaaatttggaaactgctcggaagcaaaggccatgttatttgcattcgtatgcagactttggcgccggctgctgccttcattggggttcggagaatgtggttctgatgtcagaaactcaagagagcctagtttgggagtgcatgcacggagggtcgccaccgggaggagtcggcgatctgaattttaataaaaatccttccttgctcgctgagttctctcaccattttgggataggctctcctgagttaaatgccatcctttgccgttgacaagttctggttgtgtaagtggggagaagattcgttggtacagggtgccttgtatggccagtagtgtacagccaaggggccgctgagcagctttgcaaccttgtaggcgtaatttaacctcgtagagcgttaatttctccagatctgtaaaatggggatggaggtggtattcccagaattggagggtttaatttatggtacttgtaaagtgcggatcgcagtgactggcatttggtaaggcctcagtacccattagctcttgctgctgttacgatttatgctttaccaaggccaattaattgctgactccaacacactccctgtgagagagagcccttttttgagttgttcttcaaaggatccatatataatgatatttagaaactgatttgaacacttcatgctaatgcagggctgcctgtaagataatctttgatatttaggatcttacactttaatacttaggacctgttactgtactctatatggaaatatcatgtgcaatatgacagcatattctgtatgtcttaggaacctaaaggtgcagccagccatttatacctgagtgactcgaagcaagtcacataaaatctctgtacttcagtctcttgatttaaaaaatgactcaaattatacctaaatcctcaggagtgaatgaatgattggaaaaatcacatctgaatgtttgagcaagtgaaacctggcttttggggagcatgattctaataataataataataataataatagatttttgttactaatgtgttactattcttatattttattaatattaatcttttttaaatgtttgctttgtcctcaacactgcattaagtgccatacatgtaatgcaatgttaaccgcatcagtaaccttctgtagttgacactcattattcccattttacagatgaggaaagtggaggcactgagcactggagggattgacctaaggttacaccatgtttatagatacacactagcactttttaccactagagctcatccaaagatgacatttgccatctgtgtttgaataatggagaggtagctggaaacccaacctacgcacagccttgctagtcacaaaaaagtcacgcaacatgacttttgcccaccctagttagaggctggcttcaccttgttccctcaatcctagtgagaccaagcgtgaaaacccctgcttttttaacttctccagagaaagcactgcattgccatgctaatcaacgcccccttgcccccaaacaaaactaactctgtttagttctaaataagaacaaaagaacctttggagtctggagtacaggaccagaaaaatcaggaaatcaagtgaagggctcagctcccctcttagcctctcctgttgtgtctgcctgatcccaagtggcaggcagagccccctctcggctttcctttacagtgggcaagaccatcatgatgcccttaagaagacccccaacatcttcttggggaaaaagttggctcttcagagctgtccccaaggctccctcttttagccctcttgcatagggtcatttgcatgagaacagattcctttgtgtaaagttggcctgcctgttctctgtccacgtttatagtccttcaagtcttcgtgttgggttgctaggcagatatgaccctggcttgcaaataagctcactgcatttaccagcctgtgagaacttcaacttgggtaagtagactgaaaggaatctggtctggacctctgggaagagggtcccgcaagcctgcttttgggggctgactcttcagggcagccatcaaagggggagaatatgtgaagggggcttccatgggaggcttcgatggcccacccacccttccattcttcctcttccagtctctgttccacccaccatgctcccacccaggggcttgtgttctgggcaagtgacttgtatgccactgaagcaatttcttgctttaaaactttaatatctgcttctccaattggccaggaacttcacacactctgccatctagcaacagtgaaccgatggtacaggtagttctgctaggtttattttgtgatttgggttcctcccccgcagcaccccgccaaatttcacagtttgtaggaaggcagggcccttcaaactgggaaacacacacttctgggagaatttaaagatttgccaaggggttctgaggcacagatagtgatgacgatgataataataatactacagagttgtgtgcatggcttagtacagttgctaagttaactgaattaacacgtgcaaggggcttagcactgggattggctcatggtcaggttccctaactcttggctgcgactctttcaacctgtgagtcctgggggattgaggaggatggcgatcagggaagccttcaactggcagagaggaccttgggagaactggcaaggggtgctgagccaagggagaggtgaacagcatgagaagaaggtaggaggtaggtgaggccattctgtatttggggacagtgaggtcaccttcccactcgtgtgtgtgggcggccgatgattgatttctgtcatacctgttaccatttggtgcagtatcgatgtatcgttggtgtctgtcattaactctgaagtaacttttacttgatcagtactgaatttcattcctaggcttctcagtcttcatagttgactgctcctgtagttttgccatttattactgcttaaaaattaaaaaaaaaaatagagaacatagcctccgggaggcttctataaattatctcaagcctgttgcaaaagtcctagaaaacaaacccaggctgagtgtgataatcctagtgcttttggcatgaaggcaggaggattgcttgaagaccaaacgtttgagaccagcctgggcaacacggcaagacaccacatctaagacaaattttttttttttttttttttttttttgagatggagtcttcctctgttgcccaggctggagtgcagtggcgcgatcttggctcactgcaacctctgcctcccgggttcaagcaattctcctgcctcagcctcccaagtagctgggactacaggtgtgtgccaccatgcctggctaatttttgtacttttagtagagacagggttttaccatgttggccaggctggtctcgaactcctggcctcaggtgatccacccacctcagcctcccacagtgctgggattataggcatgagccactgctccggcctaaaaaatatatatttttaaaaaattagctgggtgtggtggtgctgtcacaccactgcacttcagcctgggcaacagagtaagaccctgtctcaaaccaaccaaccaactccaaatctcagaacaaaattatttaaatcacattacatttaggagtgaatgcacgtcacattaaactgtgtgacacagttgtgggtcgtgggatctcattggcaatattgggaagggctgtgtgtgggaccagtggattttgccccgatcgagtcacgctttcttcagatagttgttgaagttgttccacctgccctgttcctcaaggcccaatgaataaaaacctgctctcctgctgtgtttcttgcctaaagggagatgctgactttccctatcttgtctaaacaggtacctcctgtcctgtgtttctagattcccaggaacaataggcaatgttaagcttccattttaaccctttaggagcagtgcctccgtgagtttccagatggctaggggacgatgcgaagaaactacaaggatgctgcaggattgtgttgtgggcaaatggtgaggaggggccccgccctgctgtgatcggtgggggcctgtggagttaggtgagctttgtagggatacacagcaggactgggtccagggagcatccatccctccatccttccctcccatgcccatcgttcatccgtccatccacccaagcggcctctgctcatccatagcccactcgtgagcactgacaactgctgttgtctcccaggccacaaaaccacacctcagaggatgtggttccttctctcatagtgtgtatagtttagttcagaagacaggacacatgcgattgttacgtaaaacagcatttcaacaagtacaattttacaagtgagaattacaagtgaatgtcttctaagaaagaacttagaaaagtcatctaagttgaggggaatgatgagatgaagctggcagggcgaggcagagcaggctgggctgttgatgttcatgttacatgcactcatccagcaaatattgactgaataccttctgggccgggtgccggaattatgcagtgcataaactatacagaatgtccctgcctttacagagtttccgccctggagttgtagatctttcttgcttgagcacctagctagccaagcatcctggacaaagagttcttttgaaatgtttctgatatggaaatgtaacttccattttcaattaacatcaacaaaggggagattcccctcacacgcatcctacatcttgacctcatattgttaaattgtccgaaaccagatttgctggaaggcagcatactccaaggatgccagctattattagagtctgcttggctgaagggacctggctcaggtttagccaagatggcacagatagtcatgggattgtgtaacaaggaaccatagtttggaacgttgaaaatgtaaactgaaatcagtctttatttcctctttgccttgtttgtgactatggtggcgtgtttgtagcttctgtcttctctaggttcagaaaccagcatcagagcttgcttaacaaacaattctggcagattcagccagtagctgcagggagtctggattttgccatctatactcagaatagttatgtttttatctttttttaaaattaaaaaaattttttttctaatagagatggggtcttgctatgttgcccaggttggtctggaactcctggggtcaggtgatcctcctgtctcggcatcccagagtgttgggattacaggcgtgagccgctgtgcccagccattatgttttattttaatgttagtaacgctttggcttgcatagcacatttttagtgtgttctcatatttattatccctttatcctcaaaacaatcaagagatggactaacagtagccaatatttcttagcacttactgagaacttgggttggattatttcattctcacattgtgtttggggttgagaaagtttactgtgactcttttttttttttttttttcccctgatatctaattccaggccaaaactccatttttcaggtaagggaggaaactgagacacaaagagattctgtaacatatccatggtcacacagctggcaaatcactgctgaatcccggatacatactcctctggaaataacacatctcaaaagtcaattccccaaaaggcaaatttgctaagtaactgcttcactaaattgtttttttcctaaatttgggtcttacccctatttctgcccctacctgagccttggcttcagagattcctaaaactttaggggaatctgtcttggggtgctcaggatgccataataaaataccatggactaggctgggcttggtgccccacatctgtaatcccagcaatttgggagggtgaggtgggtggatcactttgagatcaggagttcaagaccagtctggtgaaaccctgtctctactaaaaatataaaaattagctgggcatggtggtgtgcatctgtagtcccagctacttgtgaggctgaggcacgagaatcacttgaacccaggaggtggaggttgcagtgagctgagattgctctactgccctccagcctgggtgacagagcgggatcctgtctcaaaaaaaaaaaaaaaaaaaaaagagaagaacactactgtagactaacaacagaaatttacaaaaatacagcccaaacaacagaaatttattgtttacagttctggaggctggccagtttggttcctggtgagggctctcttcctggcctgcagacagccaccttcttgctgtgtcctcacatggcagagagagtgagcaagcaagttctctgatgtttcttcttgtaaaggcactaatcccattatctcatgacctcatctaagccttatcacccctccaaaggcctatcttcaaatatcatcacactgagagttagggcttcaacatacaaattttgggggcacacaaacttttagtttataaaaacatatttcattgagaaagtagaatggatccagggcaaggataaatctacaaaaatagaaaagatagtacaaagcactgtttttcttaagagaaagtttcctattctcatgcaaaaatgacaaagggaaaaaaattgaacttttttttttttttttttttttgagacagagtctcactctgttgcccaggctggagtgcagtggcactgtgttggctcactgcaacctccgtctcctgggttcaagcaattctcctgcctcagcctcctgagtagccaggattacaggcgcccaccaccacgcccggctaatttttatatttttagtagagatggggtttcaccatgttgaccaggctggtctcgaactcctgacgtcaggtgatctgcccacctcggcctcccaaagtgctgggattacaggcatgagccaccgcgcctagctgaaaaaatggaacgttgacacgtaaaccactgatcaggctgaacatgacaaggggaaagatatgatgcataaggtgggcctgccaaaaaaaaaatcgaacctggatcggatctcatcctagatctacaagccagtttaccaggaaaacgggtccagggaacatttcaatagaggatacaatcagctaaatccaaaatttgagaaatgttacagggcaaacaccgtaatttatttacaaatctatgcagagaaaggaagaggggagccataaatgaaaagaaaagagacacgtgaaccaagtgcagtgtgttgtgaaccttgtctggatactgattagaacaaaccaactgttaaaaaaatactgatgagataatggaggacatttgaactctgattggatttttgatgatactaaccaattgttaatttttaaaaggagggtgttatggaattgtagttatatagtaagaattaacttttagagaattgtaccaaaatacttctggataaaattatatgatatttggtattgctttttttttttttttttaagagacagggtcttgctctgttgcccaggctggagtgcagtgacatgatcacagctcacttgcagccttgaactcctgagctccagccatcttcccacttcagcctccctagcagctgggactacaggcacatgccaccatatccagttattttgttgttgttgttgttgcagagagatggggtctcgctttgttgccaaggctggcctctaacccctggccgcaggtgatcctcctgcctcagcctcccaaagcgctgggattacacgtgtggcccaccacgcctggcctggggcttatttcaaaataatccagcatatgtggagagggaggctaagggaaattgaaggagagagccagcctgaccatgtgttgataattgttgaattgaaatgttgggtaagtacatgtgagtttctcaacttttgtgtgtttgacaacttccataataaaatgtttaataagtgataagtaaatacagctttgtaaaaggttcttaaaaatgtggcaaacaggcttccagtgagcgaatttcagacattgacctggagctttcttcttgatcatacccctcaggatttttcttctcaagtggaggatagacttttagaggaaagacgttattcagaggtccatctcctctctctgatctgtgagcgaggacacagatataatttccgcagggctactgggtttttagatgcatggcgtgatgccacctaggctctctcaaactggctcctgcaacatggctttcttctgtgacagtctcaacaggtggttcgagcctaaaactaggcaggatgtcatatgccccctgtggatgggtttcctggcatcgttgggttcacagaaatgatattgcccgaaacagtgtctggtgtgaggtctccaagctttaaaaaaaaaaaaagccactttgggaggccaaggtgggtagatcacgaagtcaggagatcgagaccatcctggctaacatggtgaaaccccgtctctactaaaaatacaaaaaattagccgggcgtggtggcgggcgcctgtagtcccagctactcgggaggctgaggcaggagaatggtgtgaacctggaaggcggagcttgcagtgagccgagatcgcaccactgcactccagcctgggtgacagagtgagactccgtctcaaaaaaaaaaaaaaagcattttaattacgtaagtgaaattgctctcccaggctggatagaggcattcaaagatgtcttgtgcatcttctgttgagcttagactactacatcttggcccctacactctaagaaagcagtctttccaagttgggctagcctcaaaattacatattggggtctatgggcaaaagcctgggacacaaggatgtttattacatgtagataataaataaccctttgtcctggctatcgtggtaactgggttttccttttcacctggatggactagggtgaggcaacatgtaaggaagtgctcactgcccaggtggtgcgagtacagggtggctacccgagcagaagggccacctcctgacgttttgtgccctaggcattttgcttgtctcgctctagcactgtctctcacctggactcacctggacccatgcaagagactcctaactcagctgcttctttcatctgctgccctgcggggcatttgtgtattctcaacagggcagggattctgttacaatgtaaaccagagcctgctgctcttgctgaatccctctggcttcccatctctcgcagcaaaagcctttctttcctctctgactctaatccctgcccttcctttctccattgcttctgcagtggcttctttgccgctccttgcttgtgccagacctcagcctttcccagtttctctgcctttcctgcttggcttcctgatggctgcgtagcttcctccctgacctcacacagatccttatccaaattgtgttttctcgatgagattgtcccagaccaccccctttaactttgcagcctccatcccatgcctgagctccttctttgatgttcttcacgctatttacattttattgatttcatttctcccctcactgtcaaaaaagtaagtggtgtgagggcagggacttttgtctgtttcatttacggctgtatgcactatgcctggtttaaaatctgtcagtcagtacaaatttggtggacagatgacagaatgcgttggggagttgcttccgacaacacgtgagcagctgatgcccaaggccccttctgacagcccctgatggctcgtggccgccagccagcacacagaccatgttctgatctggggagtaaaacaacagcagtccacatcccagagacctgctcccccctgctcttttgtcttttttggcctcggctcatcagatgcttttgtctctggaaaaccaacagaaccctctgccagaaaggtctgcccgaccttcttgttatttcagctgttttcaaggttctctaggaggatgcttggccacagggaggcccatgggaaacgagggtcaggtgatgaagtgagtggctcaggaagcccaaggacttcagctctgtgttttcagacactgctcagcagatcttcaggttgctgcattccattcgcttctcagtgcttctggcccacagcctgcctgtgggtcatttggctgtttatcagtacctttacccctaagcaagcctggaaactgaagggaggtcaaacttgagcacacttagcagccctgctttaaaatgggggtcgtggagaagaataggaatcatgggtaaagctgattgtcaactaaagttcactctgctcctgcttggggagcatgagacatgggaaattgtttatgcttgtgctcaacaaggatctttcacagtcagttgtgctctgatggagcagatgggccttcgttgtgggatttgttgactgacgtggccgagtaccttctgccccagtggaaggaggggtgaatgctgtatttgccaaagactctgcctttctttatagccaggagtgctccttccctgtgtctactctcctttctgagagtgatggagaaagaaaaagctggcaaaataacatcagataagatctgagggtagcaagtaaggccattttcttttcttcctttgttctaggggctagatgcaatcaaatgcttggcttatatagctgtatgtttggaggtattgttttcagagacaggatcttgctctgttgcccaggctggagtacagtggcaccatcatagctcgccacagccttgaactcctgggctccagtggtccttccacctcagtttcccaagtatctgggattgtagatgtacaccaccatgcgtggctaattttttaatttttttgtagagatcaggtctcgccatcttgcccaggctggtctccaactctcaggctcaagcagtcctcccaccttgcctcccaaagtgctgggattacaggcatgagccactgagtctggctatggaaccattttccttatatttttgtttcgttttattttttgagatggagtctcactctgtcacccaggttggagtgcagtggcgcaatctcagctcactgcaacccccgcctcccaggttcaagcgattctcctgcctcagcctcccaagcagctgggactacaggtgcacgccactatgcctggctaattttttgtatttttagtagagatggggcttcaccatgttgaccaggctggtcttgaactcctgacctcaggtgatctgcctgccttggcttcccaaagtgctgagattacaggcatgagccaccgcacccagccccattttccttatagcacttgagctcaacgtttgagcttagatcttaatcaaagtctgtacctgggcatccattctttgagtgtctggtctgccttttccatttagttaacaaaaatggggaaaggattaaatgtttccctggaggtgtgggtgtgaagaataatgcagtggtctgctggctagattcgcttatttccattctatgaacattttaagtaatgattctctttgaaaatcctcaatggaatgtttcatcatggaacactgaagaaacacaatctgtttatttatattcccacctaaattttagcttctttcttaagtgaattttttttccctgaagtcttgtacatgggatccattctgaaatggattattgaccaggcatgaggccactctagtgttccaagctaagaagctttaagaggaaaagtctcctgtgtctgttgcacatggtcagaagccagtagaatgatctcggaatcaagcagcaggtccacaggtgtttgttaaccaccctccttgtgctgaggctctttctcctgaaaagggagatgcctttggagtcttaagatcaacaaataccagttgagtctaattgagtttgagataatacatctccttttgggaaacagaagaatttgcatttctgaacaattgattcattggcctccagatgacatgactgtttacttggatttccttttagtttgattaagtacatatttgcccattcttttggtttttatcccggtcttccaaaatttacatacctctaaccacccccatccatgtggattgatcaattgggttggcttgcaaggatgtacaactggaaaaagtgtctgtcataatcccaggcctatcttttttacacagtggttctcctttaatctgctccatacactggatgttcaactgaagctttgttgttgttgttgttaattttagatttaaaaaatacagataaggtctcactatgttggacaggctgatcttgaaccgctagcctcaagtaatccttccgcctcggcctcccaaagtgttgggattacaggaatgaaccacaatgcccagccaactgaaatttttgtttggtccacaatttcaactctgttcctccttattaaacttgcaaattggctggatgtggtgactcatgcatgtaatcccagcactttgagaggttgaggtgggaggatcacttgaacccaggagttccagactggcctgggcaatatagtgagatccagtctgtacaaaaagtaaaaaaattagctgggcgtggtggcatacacttgtaattctagctacccgggaggctgaggcagaaggatcgtttgaacccaggagtttgagattgcagtgagctgggatctgtctctttaaaaataaatacataaataaaataaacttgcaaatttagggcttttaagtgaactagagctaatctagttttatccttggctccatttgcaacctgcagcttaaagtataaccttcaattcccgtctttcaaaactcaagtctgatttgtcgtttttatttgtccactgaagttgagtcatcagttagattaagcagtttcctttttcttcttgcactagcctcatgatgtttttgttttccagcaactttgctgcttaaagtgtgatccaaagacgagcagtacaggcctcacatgggcttgttagaaatacagatcccaggcccagccttacctactgaatctgcggtttaatcaacataaaatccacagcagattcatatgtacctccatgtgtaagatgcaccactggttgaacatgtctttagattttcttattaaaattacatggctaggatgcaaagggacacatttccatgaaaaaaattttttgaaattttttctaacattttattatgaaaattacaaacatacagcaaaattaaaagagttctttagtaagcacccatatatctgctacctagattctattattaactttttaaaaccatttccttttcccccagattaacttctgtcaagaattttggctgggcctgggtgtggtggctcacacctgtaatcccagcacttaaggaggccaaggcgggcagatcacttgagaggtcaggagttcgagaccagcctggccaacatggtgaaaccccgtttctaccaaaaatacaaaaattagctggggtgtgttggtgggcacctgtaatcccagctactaggaggctgaggcatgagaatttcttttttctttttcttctttttttttttgagatggagttttgttcttgttgcccaggctggagtgcagtggtgcgatctcagctcgccgcaatctctgcctcctgggttcaagcgattctcttgcctcagcctcccaagtagctgggattgcaggcatacgccaccatgcccggctcattttgtatttttagtagaactggggtttctccatgttggtcaggctggtctcaaactcccaacctcaggtgatccgcccgccttgacctcccaaagtgctgggattacaggtgtgaaccaccgctccctgcgagaatttcttgaacccgggaggcggaggtttcagtgagccgagattgtgccattgcactccagcctgggtgacagagtgagactcagtctcaaaaaaaaaagaattttagctggtcatagtggcacatgcctgtaatcccagctatgtgggaggttgaggcaagaggatgacttgagccaggagttcaagactggcctaggcaacgtagcaggaccctatctccaaaaatttttttaaatgtagaaacattaggttatagcttgactgttacaaataaccatgtcttggtaataagggtctcacctctccttctggaattctcagtggcacactgggatttagcagcattgggggctggtcctggtcccacccagaacactgggcctcaatatcctcatctctacagtgagtgggttggcagagatcatctctaatgttacttccaaccctgtcgctataggtccattgcgaatattattatcatcactatttttcaggtggagaaactgatgaaccagttaaatatttgaataaaaacatctgttggcatggaaaagtgattatttcctaagctactgagtaaaacacagctgcactggcagttttaactctgttttcttgtcaatttttgttctttcaggaaaccttacagaaacatgaagccctcaaccatctgctactcagttattcggggctgacggcggcttctagaacatccaggtgttctgcagatgcgagaactcatcctgtagtcaccagatggagtcccaaacagccaagcagatgtaaggcctgtgctgtggctctgaggccctgaatacagaagggtcactttcttagtggccaaagagcagttgttgacattgatgtctaattattgaacacgaccagtcattttactgagctgcggtgaggaaacactgaccatagaagatcaagccaaatgagggattgcaaatttcctgattcttttgaattaggattccagatgggggcctcatttctacagcccccaacattcctatagccgttatcactgccatcaccactgccaccagcatcttcttgcagattccacccctgctccccagagacttcctgctttgaaagtgagcagaaaggaagctctcagaaaaatctctagtggtggctgccgtcgctccagacaatcggaatcctgccttcaccaccatgggctggctttttctaaaggttttgttggcgggagtgagtttctcaggatttctttatcctcttgtggatttttgcatcagtgggaaaacaagaggacagaagccaaactttgtgattattttggccgatgacatggggtggggtgacctgggagcaaactgggcagaaacaaaggacactgccaaccttgataagatggcttcggagggaatgaggtgagtcttgagatgccaggccagcctttctttggatgtcttactcccgttcttgagaggggaaggggccgtgcaaagcacttaaagagtcattgatggacccatgctgatttagttaatttattaattaatttggtttgaagccagcatagcatcgtgaagaaatccagccatctagcacccatccatctatctagtaacattcattatgtgttaggagctaggaatacagaggtgaacaagataaaacatttttgccctcaagttattcattgtctggtagagaagacaggttaaaaggaaagtaaggggctaggtacagtggctcatggctgtaatcccaatgctttgggagactcaggtgggaggttcacctgagcccatgattttgggaccagcttgggcaacctggcaagatcccacttctacaaaaaataaaagcaaattagctagcggtggtggcacgctcctgtggtctcagctactcgggaggctgaagtgggagtgtgtctggaattggtgggttcttggtctcactgacttcaagaatgaagctgcaaaccctcgcggtgagtgttacagctcttaaggtggcacgtctggagtttgttccttctgatgttcagatgtgttcggagtttcttccttctggtgggttcatggtctcactggctcaggagtgaagctgcagaccttcacggtgagtgttacagttcttaaggcggtgcgtctggagttgttcgttcctcccggtgggctcgtggtctcgctggcttcaggagtgaagctgcagaccttcatggtgagtgttacagctcataaaagcagtgtggacccaaagagtgagcagtagcaagatttattgcagagagcgaaagaacaaagcttccacagtgtggaaagggacctgagcgggttgccactgctggctcgggcagcctgcttttattctcttatctggccccacccacatcctgctgattggtagagctgagtggcctgttttgacagggtgctgattggtgtgtttacaaaccttgagctagatacagagtgccgattggtgtatttacaatccctgagctagacataaaggttctccaaggccccaccagactcaggagcccagctggcttcacccagtggatcccgcaccggcgctgcaggtggagctgcctgccagtcccgcgccctgcgcctgcactcctcagcctttgggtggtcgatgggactgggcgctgtggagcagggggtggtgctcgaggaggctcgggccgcacaggagcccacggagggggtgggaggctcaggcatggcgggctgcaggtcccgagccctgccccacaggaaggcagctaaggctcggtgagaaatcgagtgcagtgctggtgggctggccctgctgagggacctagtacaccctccgcagctgctggcccgggttctaagcccctcattgcccggggcccgcagggccagctggctgctccgagtgcggggcccgccaagcccacgcccacccggaactccagctggcccacaagcgcagcacgcagccccagttcccgctcgcgcctctccctccacacctccctgcaagccgagggagccggctctcgccttggccagcctagaaaggggatcctacagtgcagcggtgggctgaagggctcaagtgccaccaaagtgggagcccaggcagaggaggcgccgagagcgagcgagggctgtgaggactgccagcacgctgtcacctctcaggaggatcactggagcccaggagttcaaggttgcagtgagctatgattgtgccactgcactccagtgtgggtcacagagcgagactctgtctcttaaaaaataagtaaataggctgggtgcagtggctcacgcctgtagcactttgggaggctgaggcaggtggatcacctgaggtcaagagttcgagactagcctggccaacctgccgaaaccctctctctactaaaaatacaaaatgtagccgggcgcagtggcaggcacctgtgaccccagctactcgggaggctgaggcaggagaatcacttgaacctgggaggcagaggttgcagtgagctgagatcgcaccactgcactccagcctgggcaataagagtgagactctgtctaaaaaaaaataaataaaataaaaaagtaaataaataaagaaagaaagggaaataagaattataagcaaatagcttctgagcccacatccagagttttttgtttgtttgtttgttttgttgtgttttttttttgagatggagttccgctcttgttgcccaggttggcgtgcagtggcacgatctcagctcactgcaacctccatctcccgggttcaagcgattctcctgcctcagcctcccgagtagctgggattacaggtgtgtgccacctggggagaaaccccagagatcgggtttctccatgttggttagtctggtctcaaactcccaacctcaggtgatccgcccgtctcggcctcccaaaatgctgggattacaagcgtgagccaccacacccagccccaacatccagagtttttggagaacagaagcgagggtgtggaacccaacctggggtttcaagggaggagatggcctttgaagagcaaaagagagtctgtgaggcgtgggagatgtgactcacttatttatgaaaggcgtggcttacacttaaggcatactgaactctaagggaccacaaaagaggagcctatgcatctgatgagttgaagtgtttagaaaacagctattgcagatttttgttaaaacacccagctcctttcccttcttagatggagaacaagcgttagagctttcagacttcaggattttcttcttgggctaacattggtctgattgtccagctcggattctgtctgcactgggcgaaactcctccatgtggttcggggggaatcatttcagctcaccgcttaggatgacgcatagggcatctccacagagttttggccacttgcatcctagagcttgatgcttttcctgagatacgcgcccttggtgggtggtagtttctgcatctggtctcacccactccagttcttcctcacctccatcaaggtgaactttgtagaaacactcttctgcttccagtccttcaaagacattttttagccctaaggataaaacccataccccataccacagctaacaaactggagtttggctgggtgtggtggctcacgcctgtaattccagcactttaggaggccaaggtgggcacatcacttgacaggagttcaagaccagcctggccaacatggcgaaatcccatctctactgaaaatgcaaaaattagccagatgtggcggtgcacgggagaacctgggagacagaggttgcagtgatctgagattgcactgctgcactccagcccgggcaacagactgagactctgtctcaaaacaaacaaacaaaaccaacaaaaccccaaactgatttcttctccactcttctctcttgcagtggtctttggatgagccctcccttcatctgtgtgatgggttcatcctggtgcactctccacttcctctgtttaattagtttctactcactacttaggtctcagttgtacacgagggcctcaggaaagctttcgtggatgcctcgggtgttctgtgatggtccttgctgctttctgtggtggctgttcaatcatctgaccactacattgggttgaatagcatcctccctaaattcatgtccatctagaacctcagaatgtgaccatatttggaaacagggtctttgcaaatgttattaattaaggctctcgatgatctcagaatcgatttagggtgggtcctaaatccagtgacatttccttataagaagaggagaagacacagggacacacagagagagatggtgacgtgaagatggaggcagagattggagccatgcctctacaagccaggaacaccaaggaccgctggcaaccagcagaacaaggagagaggcatggaacagattctccctcagagcctccagaaggtaccagcccggccgacatcttgatttcagacttttagcctcctgtactgtacttttttttttttttttttttgacggagtcttgctctgtcgcccaggttggagtgcagtagtgcgatcttggctcactgcaacctccacctcccaggttcaagcgattctccagcctcagcctcccaagtagctgggattacaagcatctgctgccatgcctggctaatttttgtatttttgtagagatggggtttcaccatgttggctaggctactctcgaacccctgacctcaagtgatccactcgccttggcctcccaaagtgctgcgattacaggtctgagccaccacgcctggcctgtactgttgttttaagccacacagcttgtggtaatttgttatggcagccacagaaaacttacacacctccctcctagctctggacttcaggaagaaaaatgcctcatctgttctttcccgcttatattcctagcatgtaacacagtgcttggtacgtagtgggcaattaataaatatttgttcatcaataaatgggctctaggagctcaagatgccctggaatgtcaccccaaattttgcatgtaggaatacttttctggggagagagttcatccattcatgaacatttaccagattctccaaagggcgtgggttgccaaatgcttaggaacttccgctttcagtgtttagcaggttagcggggaaatattagtcccattatttaagctgagatttgcgaggcctacacgttttttttttctcatgtgctgtctctactgtcacactctcatcctgagcagaaaggaggactcaggggtcagatgccaaatgtggttcgttgggctctccttctccccacccccttatgaaagtgtttctttccatctgagccttgtgacagtggccaggtggctagccctctggcctgaggtcgacggcttttcattcttctttgttgacaggaaagccgggcttcctgtgaggccatgaactgattcatcgctggtttctcccactgcctactcacggccagtggggaaccatgactttcagacacgaactcttattgcccaacagggtctggggtgactagctgggactgcacgctcaagccaccacgcccggttctgttgcctcctttttatttgtgcatgaattttctaggactgctggaacaaattactccaaactggacagcttaaaatgttactttgttctggccaggcacagtggctcacacctgtaatcccagcactttgggaggccgaggcgggcagatcacgaggtcaggagatcaagaccatcctggctaacgtggtgaaacgctgtcactactaaaaatacaaaaaattagccgggcatggtggcaggtgcctgtagtcccagctactcaggaggctgaggcaggagaatggcgtgaacccgggaggcagagattgcagtgagccgagattgcgccactgcactccagcctgggtgacagagtgagactccatctcaaaaaaaacaaaaataaaaacaaaaaaacattactttgtcctttcacagttcggagagccagaagtccaaaatcaaggttatgactgaaggctctgacagagaatccattccttgcctctctcctggattctggtgcctgctggaatccttggcattctgggcttctagactcctatctccgcctcagttgttatgaggcgttctttcatgccagtgtccagactcccctcctctaataaaaataccagtctttggattgaaggcccaccctactccagtatgacctcatcttaacttaatgacatctgcgaagacgctatctccaaataaggtcacgtcacaggttctggattgatatgaaattgaggggaacgctgttcagtctggtgcaattagctgtattacgtatctctctctctctcttttttttttttttgagacacagtttcactctgttgcccaggctggagtgcagtggtgcaatcttggctcactgcaacctccgcctccgggttcaagcgattctcctgcctcggccttctgagtagctggaattacaggcacctgccactacgcacggctgatttttgtatttttagtagagacggagttttgccatgttggccaggctggtcttgaactcctgacctcaagtgattcacctgccttggcctcccaaagtgctgggattacaagcgtgagccaccatgcctggcctacatatctctttttactccgcttctaacgcagtctataatgtagtaggtggtcagtcagtatctgtcgcattaaagactaaatgtcatgcttaagagggcaggagccagacagtttgagctcaaatcccagctctgccacttcctatctgtggccccgggcaaactgcatcatcccctggagttttgctttcctcttctgtaagtggggacaatgatagcacctctacctcacaggatgttgtgagggttaaattaagtaatctgggccgggcacagtggctcacacctgtaatcccagcactttgggaggccgaggcagatggatcacctgaggtcaggagtttgagaccagcctgaccaacaagaagaaaccccatctctactaaaaatacaaaagtagccaggcgtggcggcacatgcttgtaatcccagctactcgggaggctgaggcgggagaatcatttgaacccgggaggcggaagttgcagtgagctgagattgcgccattgtactccagcctgggcaacagagcaagactccatctcaaaaaaaaaaaaaaaaaaaattaagtaatctgtaaaccaggtgtggtgttgcacatctgtggtcccagctactccagaggctgaagcacacggatcccttaatgccaggagttcaaggctgcagtgagctatgatcatgccattgtactccagcctggacaacagagtgtctcataaaaaaaataaaaaataaaaaattaagtaatctgtgtaatcagttagcatagagcctagcatacaatagatagggttctatgttagctatggttatttttgttattgttactagaaatgtccaaatggaatgtcagtgtgaattggctaatctgcatgataaaaggtccagtgacaaaacttggaaggatgaggtggagttccagtgacaaattcctgttaatccctatgctggctgtgcattggggccaacacctttatttgaatcaacacaacagctgcaacaatcactaacccttaccaagctcttgcaaggtgccaggctctaggcattaccctggctaattcttggtaccaccctacttttctcttatatctcagatgaggaaattgaggttaagtaacacgcccagagttggtgagtggccaagccaatattcaaactcagatttcctcattctagagccttattctttcagggctgggcagaactggggaatcagcaaagagaatccatcaagatttggccagctttcccatatggctgtcaaagagcaggaggccaggcgtggtggttcacatctgtaattccagtactttgggagatcgaggcggaaggattgcttgagctcaggagtttgagagcagcctgggcaacatagcaagacttcatctctacaaaaaaatcaataaattagctgggcgtggtcctacctactccggaggcggagtcaggaggattgcttgagcccaggaggttgaggccacagtgagctatgatcgtgtcactgcactccagcctgggtgatggagtgaaatcctgtctcaaaaaaaaaaggagattggaatctcatcattttttttctccctttggtgctaatgaaggatttttgtgctgtccaagcataagaggcaacctgagaaatgggattgtatttagttatttattttaagatgaagtcttgctctatcgcctaggctggagtgcagtggcgcgatcttggctcactataacctctgcctcccaggttcaagtgattctcctgccttaacctctcgagtagctgggactacaagtgtgtgccaccatacctggctaatttttgtatttttagtagagacagcatttcaccatgttggccaggctgatcttgaactcgacctcaggtgatccacctgcctcggcctcccaaagtgctgggattacaaagtgcgtgggtggcacccaggcagaaatgggatttagatgtcagtcatcaaaatggttgatgcaaccatcgttcaggaggctcacccagccagggatgtgtgatggctgcagtttcaggtgcctgcaatcttatcctgcctactccagcttcatctccaaccctctcctcatgttcctcacattgcacatgtttctgttccttgaacatatgcttttccctgcctcagggcctttgcactggctgttgcctcttattggcgaggtctctcctcaggcttcaagcagctgatcgcttctcatccttctggcctccactcaaataccatgtcctcagagaggcctttcctgaccgtgctctccaacattgccttcctaccccatgcacatctcctacccattctcctgttctgtttccatgacctgtatcactgttgaaatgatcttctttgtttacttctttgttgcctgtctctcccactggaatattgcctccttacagcagcctccttatctgtcttatttatgtcttcagtggctaaaacaatgcctggcacatggtaggtgctcaaacaataattgttcacgtacttggattcctggatctaaacttctaggtgtgcacacatgggttgacccgagcatgagagctggaactagactgccttggtctgttacttgctagctctgggacactgtgctagttattaaaccttgctggaccttagtatgcttatctctgcaatgggaaaataatggcacctacatcacagggctatggtgaggaggaaataagttaggtcatataaggcagcaaaagggtccctggcatgtattggtgcttgatgggtgctagctcttatgattccctatgacaccggccctgctcccctgttcgtcacaattccctcctctggctggagggtgaggcctgttttctcagcgtctgttccaaaagcaccttgctctatctattcccagactctcacccttccccaggttgagctgtaggactcatctggcttcttagaatctgcttgtttcttctcattcctagaccaaatccccaagtcaacacctaaaggtctcagtaacatttcccttttagtttgtggccagcgcacacgattcgttttttgtttgtttttaacctggttgcaggagatgtgatttgcccatttttgcacagaaagggcaccatccgtaccacaattatgatgtcgttatttgttaaaggaagaaaggaatctgggggaagaaaagcagaatctttcggtgacttcatattttggtatcccttttcagacttctaaactctatttacatggagataaaatagggattatggcctaaaatcccacagccttaagcccatttacagtagcccaggtcaaagagcattcatgtcaccatatccctttgggagaaactgaggccgagagagacgaagtgtttttactgttataatcagctctctgccatgtgggggtcgattatgtggtttgtgggtttgctagctcaaagattgactacatgaaaaataatgatgaactgttttgtttttttttttttgtatgtgaaaaacccaaagctactgcaaatcagcaaacatctctttatcagagggcgttgtcgtttagggcccccagtgttgagagattgctcatgtatgcaccgcaaggccccaagtcccctcgcacatgtcagtaggttaagcagccaacctattttgccgttgaccttgtgggatgtcattttgccaatgtcctttgtagatctgagctgggctgtgctgttgaacacttatcagtttaaaaatgataagatagccagaagataattgaaatgaaatttaaatgaaaatgtcagggacttagtaatcaactaaaacttaaaaatgttaagcaattggccaggcgcagcagctcatgcctgtaatcccagcactttgggaggccaaggccggtggatcacctgaggtcaggagttcaagaccagcctggccaatgtggtgaaaccccgtctctactaaaaatacaaaaattagccgggcgtggtggcgggtgcctgtaatcccagctactcgggaggctgaggcaggagaatctcttgaacccgggaggtggaggttgcagtgagctgagattgtgcctttgcactccagactgggcgacaagagcgagactctgtcttggaaaaaaaaaaaaaaatcaagtaaaacaggagatgaaagcaacttgcattacaataggggacagaggatgaattgctcatgatttaaaaaagagaagaggaccaatgcattctgttggcatcatttccagctcttcatgcagtctgaaattagttaagataactctgagagctcggtgaataaccctgatgatacaacactagtttggttcttgctggcagcacatctcagacccagggaaagccagtgctggtttcacctgtgataaacaagtgacattatttcttgaaaattctcaggctgggaagtgccttgcatatgactcctggctgggtggctggattcaggcaatggcctaggatttctgaatggggatttgagctcctgggcagtaatgactcacaggtctcttgggagagagacagagaatgcccagtgatcgtgagagagaggtggccacaggcagcgaagcccagatacttcccatttgcttgaactgtctgccaggctgactcagaggtgcaggtgacagcacactgtaatcatgtttacttatgtacgttgatttgcaatatgttaactttgcgccttgatctcatttcttctctgctttcccccttctctacccctggtttaattttgagtcaagtcaatgctgctgctgctaggagttacgggcagtggcttagctcggaatcaaagatcaatatttgccacaggaaggtcaggggctcccagggacttgaggctgtttctaaaacgggcctcagtgagcaatgaattgagctgtcaatttagttgaacacttggcttgatttgtgttctcagaattggctttttgcaagagttcatgcaccctgttacctctcagacctctttttctcagccaccctgctgccttggggatttggcagtaacctaatggaagatgcgaaccaggttggcagtcacactgcaggggattgtgatgaggtcttgatatctggtggacagtatggggacgagggcagaaaggacagtctaaacaagaccaatattagggagagcaggccgcttcctctttcatgtaattccttttcagctgtattcctaaccctgacagtaactcagattcagggttgggaggaccctcactggagagaaatcctcttgtcctctgaccttcaccattatcccctagaggccagctttgggaggtcccatcctgacttctctttgtaagctctcggcatggtgggacaggcgactttatgtttttgcacttgagtaaataggtcaaatagaatcaaaatcatgtcatgcccacctttcaactggggccaggtaagtgctgaacaaaagggacttcaggtttttacctcatggctctgtttgatagatggggacaggcaggaacacaatgacctagatggtagccaatcttagagaaaagaaaaggaactgaaatattaaccagtggggccttggtgccagcctgcttaaccaactgcaagctcaaagtagcctgtccaattgctattaatagttcctcttttaagcctcccaaatacagtcattcaacagtgaatctctacgaagaggaggacgtgagacaactgctgggagaccctagccagctctgcccttaagggaccgatggcctgatggcaaataaagacaagaaaaccagcctttagaatgcaggagggtagtgtgctgtgagagtggagactcctgccatatctcctactccttttgcttttataacctgaggtagatgtatctgaattgacagcttaggggatagaactagcatatcacttatagattggtctcagtcaagaaagagaaaggccccttgctgggcttctcaccttttaggtgataaagcttgcagtgaggaatcctgttaaagatagtgccgtggctgggtgcggtggctgacgcctgtaatccaaacactttgggaggccaaggtgggcagactacctgagcccaggagttcgagaccagcctgggcaacacggtgaaatcccatctctactaaaatgcaaaagaaattagtcgggcgtgatggcgtgcgcctgtagtcctagctactcaggaggctgagacaggcgaatcgcttagaacctgggagttggaggttgcagtgagccgagatcgtgccactgcactctggcctaggtgacagagcaagactccgtcttaaaaaaaaaaaaaagatagtgccgtggggctacaggaagagaaaagtcatttctctagagcaaagtcaagaggtcatgagtaaagattatctgttaagacttgaatgctgagacttaaaatgaagggagaggagagtgttgtaggcagaagggaaggcaagagaaaagacccagacctgattcctaggatctccctcggggcactgtcccaggtgctgggaacacagctgtgatccagacaaccaaaagccctcactctccggggggtgttgcattctagcagttgagtatggcagggctgggagtgtgagactggatggagggactgggcatctggtacagtgtgtcatatacatgtttacaggattggacatgatcctgcaagctgtggggatcctgaatgactgaagtcatccacctacatttgagaatttgagatgggattttccagcttaccaggatggcccacctgggtggctggaagggcgggggtcacgttgcagtgatctccaggatggcttgactcagaattgtggcaatggagagagatgtcagattcaggaggcttatagatgcctatgtgtatgtcgcattgtcgtataccttgtgtgtgtgcttccttgaatgtgaatgtgcatatatatatgagactgtgaaaaggaaaggagaaatttgccaaggaccataaccaagctcagctgccaggaatcctttctggaaaagaacaagaggctggatgtggtgacgtgcggtggctacttaggaggccacccaggaggctgagacaggaggatcgcttgagcccaggaatttgaggctgcagtgcactatccttgctcctgtaaatagtcactgcactccagcctggacaacatagcaagaccccatctcaaaaaaaggagaaagaaacaaaaagaaaaagagtataaatggattaatgaatgaatgagtagacgaaaggcaccaagttcactatttgctgccacatttgcttgtagcttacaaagggcctgcgtatccatgatctcaatgatctcacttgacaaccttctgaggaataagtcagctgtgttcccatttaacagaaggcaatgtggaggctgggctgagctggttctctgagttttatttcagctactttccagttcccatctcccaaccctgtccctttacacacaaaggccgcagcaaaagattttaaaaacctattttcacgtccatgcctttaaattatgaatggaacaaggacagtttttattccagtcagagttgccacagaacaccccatcatctattttaaattccttgtaaatgaaggctggacacgcttaactttgcaacgttatgtctctccggggcttttgtggcagcctttccagtgctagccttccctgattctaatacacataatttatgcaatggcaagttgctttggtttctgtctggctgtgtcttaatttgcgttgattttcttgttaacaggctgctgtaatgtctggctctgtatttccagctttgctttacaatgtattttcagactttaattaggacccctgatgatgaactggcctgagcctgcccagatagacttgggaggaaagaaagctttccaaataacaaggtcattttattgcttattaattagtccaactaaatggagacagtggccaggagggggaaaaaaggtgacgtgcaggccagttcataaagctgcatttttgggggtgggtacagcgtctccaaagaattgcaaataaaggaaacgagattgtttctgagagttaagctatgaactttaacacactgtggggaaggaattgagccctgaaagcatccgcttaagtgattacatgaagaatgaactgacatgttttttccaatcaaaccacctgagtttctctaagttttgtttgttcaccagatattgctggggcagccctgccccaccaaggtgctgtgcttggggctggagttgcaactctaagccccatctcatgaaacctacacccggcaaaggaactcaaaactgcatcccgctgtagaaatgtacgatagctggccgggcgcggtggctcatgcctataatcccagcactctgggaggctgaggcaggcggatcacaaggtcaagagatcgagaccatcctggccaaccccatctctactaaaaatacaaaaattagctgggcatggtgttgcgtgcctgtagtcccagctactcaggaggctgaggcaggagaattgcttgaacctgggaggcggaggttgcagtgcgccaagattgtgccactgcactccagcctggcgatagagtgagactccgtctcaaaaaaataaaataaaaaaaaattaaaaaaaaaagaaattaagatagctgttcccaagatgaggacgttaacaagcccacggggagattacatttagggccactgttaaaattgggcaagcagggataacattcaggcagtgtgtttttggcactgaccagccatattagtcagcttgggttgctgtaacaaatacaacagactgtatggcttaaacaataaatgtttatttctcacagttctggaggctaaagtccaacatcagggtactagcatggtcaggttttggtgagggctctttcctggcttgcagacggcccccttcttgctgtattctcacaaggagaatacagttcaagaccagcctggtcaacatagcaagaccccatctctacaataataataaattaataagagagggctctctctctctctctctctgatgttatcatcctaattattggaagacatggagggtctgggaggagaactggttattttttttttggagtgaacagatttcgaattaacatctagttggtgccatatcctatcagtgtgacttataaattctctcatttgatccttgcagggattttataagattagcattattatcctcacttacatatgagtaaaatgaagttcagatagtttgagtcactgcagactctaatttataaattctaggtctgagaagtcaatgaaaactaggaaaaggactcaaattaacttgactttaccccaaagccatagacatacttaatgagagagagagaaagaaccctcttattaattaattaatcattattattgtaaagatgggctcttgctatgttgccgaggctgattttgaactcctgggctcaagcagtccttccacttcaccttcccaaaatgctgggattataggtatgaggcaccactcccagccaagtcctcttttcacaaatgcacttatctcatcatggaagctgatggaaccctcataaccttatctaaatctaattaccacctaaagggcccatgtccacatatggacacactggggattcgggtttccacatatgaatttcggagggacacaaacattcagtccatggaaccaggcaagaggaaatggtggctcaacagcctttgagtatcccagacccactgtcaaagatcaatccacaggctgggtgctgtagctcatgcctgtaatcccaacactttgggaggccgaagcgggtggatcacctgaggtcaggagttcgagaccagcctggccaacatggcgaaaccccatctctagtaaaaatacaaaaattagccaggtgtggtggcgggtgcctgtaatcccagctatttgggaggctgaggcaggagaattgcttgaaactgggaagtggaggttgcagtgagctgagatcatgccactgcactccagcctggttaacagagcaaaactccatcaaaaaaaaaaaaaaaaaaaaagttaatctacagtagagaaaaggccctcaagcttcacaaagtaaaggacttttttgatgctccatttgaattctcttagcattaacgaagtccacactcactaaggcaaacttcagattctgatttcctgtgtagcttgtgcacaggaagaaaacatgttgaccacgctgacattctggttcctgtacccatccttggaagtcagatgggtcgtgggcattcctgcctctttcttgggctcacatggtttgtgtggatgtgagtcaggctctcggggctggcaccaccaagcatgactctcaggaccttcccagccaaagactggctcctgtaacacgatgacctagttaatacgatacctcctgcggaccggcccagctccagacaaccttccctcgcgtggctgtagtggaaagggcataggaatttgggttggaaaggcctgggttcaaattctggctttgccatttcctccctgtaggggtctgcagtcttcaatatggcaccgtgatgagacaggccttggcataagatgcactgagctcataccagctatgtagtcttggaaagctatttaaactctctctgcctcagcttccttctctgtagaatgggaatttggatgcctgttttacagagtgttttaaaagttagaaatatgtgtaacatgagtagagtagtagccacttggtacgtgttagatatttttgttactataagacaacgctaatgcctatttataccttaggtctcagcttacacttaacttcttttgggaaatgctttcccaacacacaggtatacacacttggtgccctttgagaacatcctgtgcttcatgtttcccaaatcctcttacataatgaaattatccacctccctcactgaccagtgagcagcttgagggcagggatttgtcttgttcattgatatatcctggatcacctacagcaggggttctcaacccccaggccactgtaccagtccatgacttgttaggagctgggccctacagcaggaggtgagcggcatgtgagtgaagcttcatctgtatttacagccactcctcatcgcttgcattaccgcctgagctccgcctcctgtcagatcaacagcggcattagattctcacaggagtgcgagccctattgtgaactgcccatgtgagggatctaggttgcatgttccttataagaatctaatgcctgatgatctgtcagtggctcccatcacccccagatgggaccatctagttgcaggaaaacaagctcagggctcccacttgttctacattatggtgagttgtgtaattatttcattatatattacaatataataataatagaaataaagtgcacaataaatgtaatgcatttgaatcatctcgaaaccatccctcccaacccctgtctgtggaaaaactgtcttccatgaaactggtccctggtaccaggaaggtgggggatagctgacctacagtataatagccaggactctctggttgtaagtgacggaaacccaactcaatcaacctaaacacaaaagaggcacaggtggggctcttgaactaagcccctgagagcctccattttttcctctgtgcttctgagccagttggcccattctttcaagttcctccatgtgatagtcaaggaagcccttacccttctggggttgcctgcttatagcttgatattccagagggggagaaaagagctatttctcattctctggttcagaaaattccaagtttaaattcacaatagccctgcttggctcatgggtcatgggccagttcaccaaggacagaagcttgtgctagtttgattagcatgcagtggagtcccacactgcattagtatccaggtgggacattacatgggaaactatcattaggtctcaccaggtagagtgcaggacccgagctgctgttggtggagaaacagcgttcctgaggtctggaattataccctagggcagtgacaagactaggcagacatacctctgctcttgtggaactctaacctagataagggagccagcagcagcaagaagacaaatccctgaacaagataaagtcagatatgataagggttagggacaaactcgaacagtgctgctgcaggtgtagccgggtcagggagatctccccaggaggcgaaatgagagctgaagcccagctgaccaggaggggccagccctgtggagaccagagcagagtgatcaggacagagggaacacaaaaagggcctgaggccagagccagctggaagtgttctagaaaaaacaactcagcctggcgcggtggctcacacctgtaattccagcacttttggaggcccaggtggatggatcttgaggtcaggagtttgagaccagcctggccaagatggtgaaactccgtctctactctaaatacaaaaattagccaggcgtggtggcccatgcctatagtcccagctacttgggaggctgaggcagaagaatctcttgaacctgggaggcggaggttgtggtcagccgagatcgtgccattgcactccagcctgggtgacaagagcgaaactccgtctaaaaaacaaacaaacaaaaaaagcagaaagtaaaagcaactcaccttgtctggctggaggggagagagcttggggaggaggggagttgatgccaaacggggtccagatcactgaggtggcaagttcccacctttcccgtgttgtgtcacacctggaaactaatacttcttgtggtgggttggggtgggtggttgtgcatcaagcaacagtcgtcagcagccccatgagtcatgtggaaggagtggccagagaaagagtggatgctctacagcaaaacacaactgatggtagcaatagtcagtgctcagacaacaggcagatgtctacattagacatgaaaaggctgcaagacagtttcacgtgcttccgaagtcaaagtcagggcttatcctcctggagggtaaggaaagactttgtgataatagtaggttctgaaggacaagtaggagtttggaagggcaagaagagggtaatgcattatttagcagagatacaacagagttaacatgttgagctggagagttgagtggggcgtgggggagggagggattccagatgttccaggaaaaagaatactgttgagctggaccctggagacacgcagggaggtgtactcgttttgaggcctgctgtaacacagtaccacaaattgagtagcttacaaccaccaaaatatattatcttacaatgctggagtctagaagttcaagatcaaggtgttggcagagccacactccctccacagcgctaggagaagttccttcctttcctcttccagcttttggtagctccaggcattccttggcttgtgctggcatcattttcatctctgcctcttcttcacatggccatcttccctctgtgtgtctctgtgtcttcgcagcattctcttctctgtgtctctctgctcttctaaaataaggacaacagttacattgcatcaagacccactctacttcggtataatctcatcttaacttaaaattacctctgcaatcaccctttttctaattacattcacattctaaggtagagggctcaggacttcaacatatcttttggggggacgcagcccaacccacagcaagcagccatggctcagaggctgataggtaggttgagccagagcatgacgggttatggtggctgagacttggggctacaaaatggcatgaccaatcagcgtgctaccatgggttagagagagtgcttcgggtgagggacaaccatcattttgatcctgggtggcgtcattgggaatgaggaggatctgaaggatgcaggaagtggcagagagacttgaagataatgccttggtctctactgcctcagtgccactgcttgaccaggagggggtggtcacagcttttggagggagaatgctgagcttggttcagtgcatgttgagtctgagttgacatgtgacatacgtgtggcagtgtacatgataccaggatagcagcagcagcatcgaaatgccactcacccccagagttccatccactcacatcccgctcacttattgcccctccacacactgaaatgttctctttctcccatttagctggtgatggcagtcatcatgttgcctgccatgaattttaaaaacctactctgtgctggatgctttgctaattactttatgtacatcaccttatggaattcttcaaataacttgatgagataggtctgattatgcccattttgcagaagaagataactgaggcttagattgagttacctgtctagtctcacactagacagagttggggtcgtatttggacccaggcttgtctttccgtgcctttaattttcttatcactctgcctcccatagcattttctttgtatttctcagatagggctcatcttattttctcttattatccacatatgacagttctgctagagtataaactcgttgatggaaagggctgtagctccccagctagctctgtcgtggttggttgaactagaccaggagcttgtaggtgaaaggtttgagatggcaggtgatacgcatgtgtctgtttggaggcagagagatgaacaaagggagggatgtccagtggtgtcttcaggtctacatgcctagatgctggagggatgaagtcatgggacctgcagagaacccagctgaggaagccagtgtcgatgcaggctatggctttcccaccagactggaagaaacaggtcttacgaggtagagtgcaggacctgagctgctgatggtggaaaaacagcattcttgaggtctggaattacaccccagggcagtgatgagactaggcagacatacctctgctcttgtggaactctaatctggataagggagccagcagcagcaaaaagacaaatccctgaacaagataaagtcagatatgataagggttagggacaaactcgaacagtgctgctgcgggtgtagccgggtcagggagacctccccaggaggtgaaatgagagctgaagtccagctgaccaagaggggccagccatgtggagaccagagcagagtgattaggacagagggaacaagaaaagggcctgaggccagaaccagctgggggtgttctagaaaaagcaactcaccttgtctggctggacgggagagagcttggggaggaggggtttgatgccacacagggtccagatcactggggtggtgagttcccacctttcccgtgtcatgtcacatctggaaattagtgatatttgtgcccctttccaaggacctccactgaggctggcagtggagggctgtctccacattgtgctgtaaggggactgctttccgtggagctgggcgggtaacagacagagcccacattggacagctctggtgcctcgagttgccccaggccccactggctgccccaggggctgagatgagcacagtctaagaaaacttttggttcatttgggcctaactgtgctccagctcccctgctgggaggctgtgatggagggcctgtagaccgtgctgacttcgaatttgctttgactgcaataagaacccatgaaagggtttccagccagggactaatcgcaggggtgtctaatcttttggcttccctgggccatgttggaagaagaattgtcttgggccacatataaaatactctaacattaacgataactgataagctaaaaaaaatcacaaaaaaatcaatgttttaagaaagtttatgaatttgtgttgggccgcattcaagctatcctgggctgtatgtactcatgctaggtgataatcattttcaaagacgctgggtgtggtggctcactcctgaaatcccagcactttgggaagccaagacgggtggatcacctgaggttgggggttcgagaccagcctggctaacatggtgaaaccctgtctctattaaaaatacaaaaattagctgggtgtggtggcatgtgcctgtaatcccagctacttgggaggctgaggcaggagaaccacttgaaccctggaagtggaggttgtagtgagctgagatcgagccactgcactccagcctgggtggcagagtgaggctccatctcaaaaaaaaaaagaaaaagaaaaagtttaaagatgactttggatgcaccatggaaaatgaggggagggggaattggagacaggaattggaagtggggagtaagtagggctgccacttatagctggggagactgtatattgctcacctctggactgtggtgtgaatggtggcccttgggttgtttgacatgatggccctaggatctgggtacaaggtggtggtagcttggaccaggacatgagcagatagatggagagaaatggatagattctggatatatttggaagttgagttgataggacatgctaataatttagctgtggagaggcaggagggaatgagagaaacctcagatgactgtgacttgagtgacagggtggggggtgctatttactgagagggaagattggtataggaatagctggtatgtagggaaaaatctaaagaaagcccagataaacttgcagaaactggcaaaggaagcaaccacatgccacatgggagcgctgtctggggccctgagaccaacaagcagttttctcctggcctgggaagcccattgggctgagagatttaagacaaggctgatggcattgtggagggctagctttaggggcactgtggcctgggcagttgcacacttagaccctgtgcttggttgcaggctttgctgtctctgtcttaaaatttttagtgattcttgaaccagggacgctgcattttctttacctttttcttttctttacttttctttatttctttttttttgcggggggggggggaggtggtgggcggggacagagtgttactctgtcacccaggctggagtgcagtggcatgatctcagctcactgcaacatctgcctcctgggttcaagcaattctcgtgtctcagcctcccgagtagctgggactataggcgcccaccaccacatccagctaattttttgtattttagcaaagacagggtttctttctttctttctttctttctttctttctttctttctttctttctttctttgtttctttctttctttctttctttctttctttttttgagacagagtcttgctctgtcacccagactggagtgtagtggcacaatctcggctcactgaaagctcctgggttcatgccattctcctgcctcagcctctggagtagctgggactacaggcgcccaccagcttgcctggctaatttttcgtatttttagtagagacggggtttcaccgtgttagccaggatggtcttgatctcctgacctcatgatctgcccgccttggcctcccaaagtgctgggattacaggcgtgagccactgcgcctggtgcaaaggcaaggtttcactgtgttgctcaggctggtcttgaactcctgagctcagacaatccgcctacctcggcttcccaaagtgctaggattacaggcatgagccactgtgcctggcctgactattgggggaaactcagcccctgatatttcacgtgcgtccttttctattttccctaagtgtcagccagtctgagaaataaagggaaagagtacaaaacagagaaattttaaagctgggtgtccgggggagacatcacatgttggcaggttccgtgatgcccccaagccacaaaaccagcaagcttggggagggagtgtacgaatagggtgtgggtcacagagatcacatgcttcacgaggtaatagaatattacaaggcaaatggaggcagggcgagatcacaggaccgaggcaaaattagaattgctaatgaagtttccgacatgcattgtcattgataacatcttattaggagacagggtttgagagcagacaaccggtctgaccaaaatttattaggtgggaatttcctcgtcctaataagcctgggagcactacgggcgaccggggattatttcatcctttatgtacaaccgtgaaagacagacattcccaaagtggccattttagagacctccccttgggaacgcattctgcttctcagggatgttccttgctgagaaaaagaattcagcgatatttctcctatttgcttttgaaagaagagaaatatagctctgttccgcccagcccacaggcagccagactttaaggttatctcctttgttccctgaacatcgctgttaccctgtttttttcaagatgcccagatttcatattgtttaaacaatttgtgcagttaatgcaatcatcacagggtcctgaggcgacattcatcctcagcttacaaagatgacaggattaagagattaaaggcaggcataggaaatcacaagagtattgattggggaagtgataagtgtccatgaaatcttcacaattgatgttaagagattgcagtaaagacaggcataagaaattataaaagtataattttggggaactaataaatgtccatgaaatcatcacaatttatgttcagagattgcagtaaagacagacataagaaattataaaagtattaatttggagaacttaataaatgtccatgaaatcttcacaatttatgttcttctgccatggcttcagccagtccctccgttcggggtccctgacttcctgcaacacctgaccctgcattttcatattttactgggttccatgaattttgaagctggttatgctgtggtggataaagagacaacaccagtaagcttgggccagcttgtacagagctacaaattctgaccaaaatgaagccaggggcaacagaagcttatgacttaatgtatgtgaagtgcttggaaaagtgcctggattatagtaagtgttgcataaatgtcagctataagagtaataagagggctgggcccagtggctcacgcctgtaatcccagcattttgggaggctgaggtgggtggatcatgaggtcaggagattgagaccatcctggctaacatggtgaaaccccgtctctactaaaaatacaacaacaacaacaaaaaattagccaggcatgggggcagacacctgtagtcccagctactcgagaggctgaggtaggagaatggcgtgaacgtgggaggcagagcttgcagcgaagggagatcgcgccactgcactccagcctgggcgacagagcgagactccgtctcaaaaaaaataaaagagtaataagaggccgggcgtggtggctcacgcctgtaatcctagcactttgggaggccaaggcgggcggatcacctgaggtcaggagttcgagaccagcctggccaacagtggcaaaaccccatctctactaaaaatacaaaattagccgagcatggtggtgtacgcctgtaatcccagctacttgggaggctgaggcaggagaatcgcttgaactcgggaggtggaggttgcagtgagccgagatcgtgccattgcactccagcctgggcaacaagggcaaaactctgtctcaaaaataataataataataataataataataataataataataataaaagagtaataagagttgttataaggaatgtttaggagtgtgagccaagaggatccttgtgcttcagtctcaggaggaagggaacagaaaaagctgggtagagatgaatatttggggagcaaagttgtgagcaatagctagaactcgatttggacatcaaagggtagcagttactagctaccagccacatccacatcctgggctcagaagttgggtcctggtggtcccaatacgtgtggctgccagggacgctttgaaagaaacctgtgcctagggaattttacccaaggcccccagtgatggagggaagaaagcctgcagtgtttcttctagcctccaggagactgatggttcaggaaggaagagctggccggggtggcgccaggagctccctgaggttctggagggaggacctcacccaacctgtcagtgcatatgttggcgcacacaccttcccttccctcattctggcagaaagagggatcaatggcctgcttctaagatttggtttcaaggccaggccaggcttccagatggacaggactgggatctcacagtgcaatttcactgctctctgatgatgtccattgctgtttgtcaccttgaaaaacagcatcagggaatgaacccatcttctgggactgaggcccaggtctctttagcaagccttgttatgtggtacgaaagcaaagaggacagtggcgtcacccaatcagcacacatttggtagcaccccatttattctttgctgtgctggagacttcatagtgaaccaaaccttatcttatgagagacacagacattcttctggctgtgtattgctgagtaacaagccagccctaaccttaggttcaagcaacaaccattttcttagagcccatgatctttgcggtgaggaattcaggcactccttggttgggcaattctttagtactgggcgttgactaaggtcgcctcgtggagtgtagcaagcagatggtcaggctgggaggtctgagatggccttgctcctatggcggacatctccacggggaaggtctgagctggagtcaccggccagaggacctacagacggcctctgcaacgtgatggtctctgggtggttcagcttcttatatggcggctcacagagtgtttccagacaggaggtagaagctgccagtcttgtaaggcctgagcccagaaactggcatgtagggtcactcactgccacattattctgttggtcactgcagtcacagaacccatgcagattcaaggggaggggacatagaccccacctctcaatgggaggcatgtcaaagcattagtggcctttattatttatttatttatttgttgagacagggtctcactctgtcacccaggttggagtgcagtggtgcgatcatgattcactgcagcctctaactcctgggcttaagccatcctcccgcctcagccccccaagtagctgggactacaggtatgtatcaccacacctggctaatttttaaatattttgtagagacgggagtctccctatattgcccaggctgggtctcgaactcctggactcaagcaattatcactgttgtagttgagtgttataagagatatgtcggccaggtggctcatgcctgtaatcccagcactttgggaggccgagacgggtggatcgcaaggtccggagattgagaccatcctggctaacacggagaaacctcgtctctactaaaaatacaaaaaaattagccgggcgtagtggcgggcgcctgtagtcccagctactcgggaggctgagacaggagaatggcgtgaacccaggaggcggagcttgcagtgagccgagatcatgccactgccctccagcctgggcaacagagcgagactccatctcaaaaaaaaaaaaaaaaagatatatgtcaaatggtatataattacatggagaagggagaccccgcttctgtgcgggtattggggcgtggcagataggttgcaggaggagagatcagggaggatgtcatcgaggtgctaacattggaacatttgaactaggccttgaagacagctgggatttgccaatgaatggaaggtaggatagtggggagagacattcccagtggggagaacagcgtgtgcgaaggcacagatgcatgggagtaatgtggtgtgttggaagcaaaggaggtgcaggcatcggggcagcagataagcccagagaagcaagaagagcaatatcgtgtttttcttttctgtttttgagatggagtctcactctgccacccaggctggagtgcagtggtgctatctgagctcactgcaacctctgcctcccagtttcaagcgattcttctgcctcagcctcccaagtagctgggactacagacacccaccaccacacctggctaatttttgtatttttagtagagacggggtttcactacgttggccaggatggtcttgatctcctgacctcaggtgatctgcctgcctcggcctcccaaagtgctgggattacaggtgtcagccaccgtgcctggtcttctttcttttcttttctttctttttttttagacagactctcactctgtcgcccaggctgcagtgcagtggcacgatctcagctcactgcaacctccttctcccagattcaagcggttctcctgcctcagtctcctgagtagctgggactacagacacccgccaccacacctggctcatttttgtatttttagtagggacagggtttcactatgttggccaggctggtcttgaactcctgacctaaagtgatccacccaccttggcctcccaaaatgctgggattacaggcgtgaaccaccacacctggccaagatcatgtttttcagtaagggattagtgtgatcaaattcgcattatggaaaaacatttgggttgggcacagtggctcatgcctgtaatcccagcactttgggaggccagggcgggaggatcacttgaggccaggaatttgagaccagccttgccaacatggcaaaatcccgtttctattaaaagtataaaaattagctgagcatggtggcgtgcatctataatcttaggtactcaggaggctgaggtaggataatcacttgaacccaggaggtggaggttgcagtgagctgagattgcaacatcactgcactctagcctgggcaacagaatgagactctgtctcaaataaataaataaataaacaaataaataagaaaaagaaagaaaaatatttgtactagtgtggagggtgacctgaggtgacaggaagatcaggctcctgtaataaccttgactctagctcctaaggacctctatggaggccgtgatagtgggtggaagagagggaggacagatctgggagacttgatagaacttggtgaccacctgacatggagaatgagcgggagtgaagcgtctaggcagccctgatgggttctctgctgggatgtggggtggatggtggtggcactgctccccagatggcagatgggagcaattttggaggggaaacactgagggcagccctggattattgcgtttaaggtgccaagaagagatgttcgggaggggaggggagcgaaggtggtccccacatgaagtctgaactggaaatacggatttggagatcatcagcttttaggcattagtttagagagtggggctgtctgagacttcccagagtgtgtgagtggactagaagtaaaaagagggctggggagggagcctgggcacattccaacatcttagatgtggacaaaagaagacaggcccacagtggagggagaacagcagccatcagggaggccaaaggaggatgaagacaggtctcctggaaggcgaaggaggaaggtttccagaaacaaggtgctgtctggatgatcatgaccctgaacaggcacctggagattaggaagctaagcagaaacgcttctatttatttatttatttatttattgttttgaggtggagtttcgctcttgttgcccaggctggagggcaatggcacggtctcagctcaccgcgacctctgtcccctggattccagtgattctcctgcctcagcctcccgagtagctgagactacaggcatgtgccaccacgcccggctaattttgtatttttagtagagacggggtttctccatgttggtcaggctggtctcgaactcccaacctcaggtgatccgcctgccttggcctcccaaagtgctgggattacaggtgtgagccactgcgcccggccagcagaaactcttctttccaaaagcatacattcctagaatcccagcaccgctcgctccaggaaacttctgtttcaggcaggtctccgaggaaaaccccccaggcattcaggtgcctggtttttctctagatggtttttagggtataaaaaccttgaaaaactggcttccctgaatagatcattccagtgttgtgtcatctgatttcaagaggccttccccaggcccagttagtactttcctccgttcacattgagctgtatttgaagatgtgtgtgtgtgtgtgcatgcatgtgtgtttttagtgtgtgtgtgcgcgtgtgggtgtcccacacctgtctttggatggttaagcctcaaggtctcttctcatgcccaaaccaaattcatttttctgtcctcccttacattaggccagggggactgggcacattttcctctccgctttaaaacttcactttatctcagtttcctccttccaagactggctgtggagtgggcgagtctcccctgccccttcccttcaactttcaagacaagcttctggagttcttagtagaggcagcatggtttaatggcacctgcataggatttggaatcagacacgcctgagtcccagggtgtgcccttggatacctgactgcatagtgccacggccaggagcatggactggatttgcctggatacaaattgtggctctaccccttccagcagtgtgaggcaaggtctttaacctccccctgcctcagtttcttcatctatatatgggaatccttatatgagcccatcctagggctctcccaggaggggcatttaatgccattaaatgacttagcacatgtaaagcgccctgttcgtagttcaagctaaaaaatggttataactattcgttgtaaaatggaaacgacctccttggactttcgtttgaaaatgaaactggaaggtcattgagtatagggactgtttctttgcttccttaacatggattacagggtctgccccagtagctgttgctgctcagtaaatatttttggaatgagtgaaatgataaatgaatccctttgttataaatcagtagctttctctcctgaagacctcctgacagccagcttaaggggccaaggcccctgcctaagagattctctttgagcattctccactcagtttgtaggattttttttttttaaatgaagtgatatatacataagataaaattagccactttgtagccgggcgtggtggcgcgtgcctgtagtcccagctacagctctcagttgggaggctgaggcagaagaatcgcttgaacctgggaggtggaggttgcagtgagccgagatcgcaccactgcactccagcctgggcgacagagcgagactgtatctcaaaaagagaaaaataaataaaaattaaaattaaaaaaataaaaaagaggaatattattcttccatatgcctataatactgttattatactcagaaaatgaacaaaaattccctgatgtcttacattgggtctgtattaaaattcccttaattatcctcaaacgtattgctagtttatgtgaactgcaggccaatcaaggatcacatgttacatttggttttgtctctttaatggctttaatgtaggttactacccaccccaatcccattttatcccatgatactgactttttgaagagactagaccagttttcttgtagaatatcaaaatactggtttgttaaattacttccttgtggtgtcatttaatttgtttttctatgagctgtatttcctgtaacctggaaattagatctagaggtttgattagattcagggtaaacgcttttggcaagaatccttgattttataaacttcatcttgcatcccatcaggagatgtacgaggtcagggtacccgttgtgcatgacactaaacttaatcattttataaggtggggatcgccagctctgtccaatttatgatgctccgcggttgacactctgaacaaccactcccaacacatccactgatcatcagctattagctgggggatgggttgatttggctgcaccaaagaaaaaagaaaatagatgagggttgggtgaggtggaggtggggttgcaaaaatggtgatttcctgagcctgccatcccttccttgcatctgactgcctggcatccttctgaaaaggagtgctttctctcatcacctagtgatgactgtggtccttctaaagtgtcaagatgaatgtttaattacgaatttttagggtgtggagttggcataacattcttttctaatggtggtaaatgaatttttctgagtgtcagtatggactaatggatttttatttattcatggcttacaatcaaatacactaattgttctttttgtgtgtgtgtgtgtgactgagtcttgctttgtctcccaagctggagtacagtggtgcgatctcggctcactgcaacctctgcctcccaggttcaagcagttctcatgcttcagcctcctgagtagctggaatcacaggcgtgtgccaccatgtccggctatttttttgtatttttagtagagacggagtttcgccatgttagccaggctggtctcgaactcctggcctcaagtgatccacctgcctcagcctcccaaagtgctgggatgacaggtgtgagccaccacgccaggcctaattgttttttgatgcccacattgtcccaagtttggccaggaggagcccctcgaagttgactcttgggtctttctttgcttcctggcacaagcagatgtcccagactcccctggtacttctccttcctcaaatctgcaattaactatttctcaaaggagagccaattccttttattgcaggatggggtttaaaacaaagatagaggtgtagtatcctcattgccacaggcgtgtcaatgattctaggccctttcagcagatagtagctgggagatctgtatttttaaaaagcatgagttcataatgacttctatattaattttaacattataggttttttattatcttcttttattttatatctttaccttttaccctggaaatctcggttcctgattaggaacattaatataattacttgtttgctttactctaccatatcacataaaatcgtttcaaaatcctgaacccaatattgccaccagtggaacagctactgagtgaagtttaagctttttttgtggttctctttgtccttagattatatcccattaatattgtacagccagaacactgggtgctgatattacttgaaatgattctttcctctgtgtggtcatattactgtttattatatgattggatttatttgtttcagcgttttttgttttttgttttttaattatagggtctgcttgttttccccttgtggtttaattctactttttggccatgtcaaacgtttacaaggtacgaaagtcaaactgtataacaacatagtccagagatacttgctttccccctccacatactgtttctccctccccttgtgggaaaccattcttttattagcttctggtgtatcctttcagtgtttccttgtgctttttgaagtgttcataacagtcccatcttttagattgattccaacctctgtgccacttcctctatggagatttctctaaaccttggaccgtcatccagttctttctccgtatctcaatcctagagcattctttatctccatgtcctgtggctctattcatctatttggggtcttaattacatgccattgtgcattgttgtgacttacatttgctcacgtcttgtcactcaatgtcttgtttctgcatgttccttgaggataggataatggctagaattcttttgtatttctcaacaatgtctaaaaaaggactgggcatacagtaataggtaatagattcagtcaattcttttttttaattttttgatacagactcttgctctgtcgtccagactggagtgcagtgacgcgatcttggctcactgcaacctccaacccctcggttcaagcgattctcctgcctcagcctcccaagtagctggggttacaggcatgcaccaccatgcctggctgatttttgtattttttgtggagatggggtttcgccatgttggccaggctggtctccaactcctgacctcagttgatccacctgcctcagcctcccaaagtgctgggattaaaggagtgaaccactacgcccgacctcagtcaattcttgttattgataatagttatgttctatcaagccaccgtgagtactgaattggggaatactgactcttttgctcccagggaaaatatggagttagcttcctatgggcatctgttcacaatattttcattcactagttaaattaatatataactgtattttatgaatgctgctgtgtaaagataccttattttatgtacatatatatatatacatatatatatgtatgtgtttttttttttttgagttggagtcttgctctgtcacccaggctggagtgcagtggtgtgatctcggctcactgcaacttccacctcctgggttgaagcgattctcctgccttggcctcccaagtagctggggttacaggcacctgccaccacacccagctaattttttaaaaaatattattggtagagacagggtttcaccatgttgaccaggctggtcttgaactcctgacctcaagtgatccacctgcctcggcctcccaaagtgttgggattacaggcgtgagccaccgcacctggtcctaacacatacattttctttataaggcacatcaaagcctttgagtgcttaggaacactacacagcacttaggcactacatctgggggccattttccacagtgaaaccaccaacacaaaacacaaaaatgcaaaagccatggctctaaatacactgtgaggacatttgtttacagtgcgatatgagagctgaaaccagaagggagagggtcacctccttcagcctccactgagaatgtgtgcgccaaagctactcaaactttgcaggtctgcctatatccgcaaatgaccctaaatcacctcaagtattgattttgggattaaaaacatacaacgttagtaagtaggcacatttgaaatgtggaatcttcgaataaataagattgaatttgttggattaaatccatttgaatgagttgtggaaacttggactacttgtgttgcctctctgggtttctttttcctgaaacccagaaatcctatttcctttttttgttttgttttgttttcttttttgagatggagtctcgctcctgtcacccaggctggagtgcggtggcgtgctcttggctctccgcaacctccgcctcccaggttcaagcaattctcctgtctcagcctcctgagtagccgggactacaggcgcacgccactgcaccaagctaatttttatatttttagtagagacggggtttcaccatgttggccaggctggtcttgaactcctgacctcaggtgatcctcccacctcggcctctcaaagtgttgggattacaggggtgagccaccgcgcctggccagaaatcccatttcctgacttgttccatgactgggtgatctttgatctttgagcactgaaattgcaggaactgagtgggcactgccttttcttttactctggcttcctgtggttggtgcggtcctgaccactgtcctttccctgcaggtttgtggatttccatgcagctgcctccacctgctcaccctcccgggcttccttgctcaccggccggcttggccttcgcaatggagtcacacgcaactttgcagtcacttctgtgggaggccttccgctcaacgagaccaccttggcagaggtgctgcagcaggcgggttacgtcactgggataataggtaactctgggccccgtctgcctgttgcatttactgcagtggcagccgccttgtgtttgcaaattcccaacatactccctgtctgctttcctgttcatgtcttgctgtgtgagttagggatgctctcagctataaggaactgaaaagacctaacagtgaattaaaacatacatggagctattttcctcccattatagcaagttttgtggtaactggttgctttcattaattcagctgctcaaagatgctgccgggagccaggtgctctcactcgatctttctgctctgccatccttagcatgttggtgtttggtgtttgtcctcatgctcactgcctcatgactgccatccagcgactttaggcccctgaaccacgatttggctcaaggaaggaagaagagaagggagatggctcagctctgcctgcaccccaagaattgcacttatatcttattggccagagctgggtcttttggccacgcctcactgctgcactcccagattgagaaactggggacagcattgtagtgactgacttgaacttgggcatggtaatcttcctccctttgaacaaaaccacagttctattagcaggatacatggggacatgggcattgctgggagaccagcaacgtctgccacattgtccaatgactccctctcctttaaaacatttttttaggcatctcttactcagcatttattatgtgctaggcactgggctgtttattggcatgaagatgattattgtattggcaagagaactgagtttcaggccggtgaagagaagctgcctaacctggaggggtggaggccaggtctaggcaggtatatctgttcccagccttgccctgaggctctgcctcactgcccttctcccctccaggagccaagacagcccagtattcccagaagtatcctcagctccctgtgtttgttagtctaactctcaaagagctggaccccttgggatccctgcctcctccactatacaggaaattgcaagggagggagggtgcaaccacaagcgggtggccctgtgggcatgccttgggtgtctgaaccgtgtgaacctgtgggaggttgttctacccagacccagggctggtgcctctgctattggcccttttatcccactctgggttaaagagcctgatatccttttacggaagctcaacctggagtgcggcattctttgtcccagaaggggtaagtcccaggctgtaggagagaccaattaaggtcacacacttctctttttccaatccctttcttcccataccccaaggagtcattatgttaacaacatcaacaccaagacaccatttgtgaaactgccactgtgggctgactctccttactaggccagttacatgcgtccatgtaaacctcacagccagctgaacgaagtggctcacgcctgtaatcccagcactatggaaggccgaggtgggaggatccctcgagcccaggagatcgagaccagcctgggcaccatagtgagactctgtatctacaaataagtaaataaataataaaactcatagccaggaagagttaggtcccagggctgtcccagactcagcccctatgctgcagaagtggggctggcttcttctggagctgaatttgacctcactggcccctccgtcttcatgcctttaaactcccagtaagcaactgtttgcagcttgactgtttagctgcattcctcaccccctcaccactcacgacaccttttgcacatcctgggcaggatatttaagcatatccagctgttgcaattatgaactaaagtacacttttaggaaaaattaaagacccaccaaaggaatatcagatccttttacaacactcacactttgcttctaatcttggtccatgtttatgtgttgcctagctgtgcgaataccactgggctccacttttccccctttcacattattctatgtttccatgtcatataattttacatagtataatttttatgattaaacaatacttttcataattttaatataatgtcatgttctcatgtaatgtttaatccaaatatttcacataatgcttaatacatttctctcaatcttttttatttatttgggacaaagtcttactctgtcacccaggctggagtacagtggctcaatctctgcccactgcaacccccacctcccgggttcaagtgattctcctgcctcagcctcccgagtagttgggattacaggcgtgcaccaccacacccagctaatttttgtatttttagtagagataaggttttgccacgttgcccaggctagtctcaaactcctggcctcatgtgatccgcctgcctcggcctcccaaagtgctgggattacagacatgagccactcaattgagagaaattgagagcccatttctctcaattttttattaatcttttttttcaatcccatagagcagttgcagggagggaataatggactcctagaggcccttcatccagtttcaccgattcttaatttttgctacatgcagttgtcttgaaaaaatagatcgatagttccttattgaggccacatcaaataatgtacttagacatactcctgtggttgcccgttaatctctcgtttgagcggtttaatgctgccagcgtctcaatctttgtaccacattcttttctttgccccctcaccatgggggtggcgtccctggggtctactcctcagagcggaagagcagatcagagagttctgacactgtcagagctcttgccacacattgcccgattattcccccagactgagcgcatttgcagaccgaggagcagcagggtgtctgagtttcctcatttgctgccccgtaggtgtctcggtgcttgaactgcgggctgctgatgttggccagagaggaagatgatgaaaccaggcaggaagcgggcatttctgagacgatgtggggcggtgcacctgcaccctgggcctcctggtgcctttgcagggccccagcgcgggagggcaaagtgaaggagcccatgtggggttgctgtgtctgtggagccctctttgaggggcagaggctcaggcttctccgggctcctggtgatgggctgtcttcccctttcactgtggtttcccgtgtgagtctggggtcatcctttatgtgtccctgtggacaccgtctcggccccagagagcaaagcctggcttgtacaccacattgcagcttcttttggcttgtccacagtgcgaggcgaagctaatggagagctgagtgtgtgatcagctcctcagggggctgtggtacccctatggggattcctctgaaaatctctcttatgtttttctacaggcaaatggcatcttggacaccacggctcttatcaccccaacttccgtggtaagaattcttttggggatttgttacctgggaaacagaaaataaaggtctctgtgtaagactccatgaacagctaagccatcctgtctctgggggcaaccctaagttaggacatctttgttcacgaggtcatttgagtgcatttggggtgccagggctctccgggaccttacatcccacttgctggcatcttccttgactgtccttccttggtgcctgtttgcccttccaactgccccatcacaggcccatcagcttttttgccatctctcggttctttacacctcagggaacattctgccccatgaggtccagacatggctaatctgggaagaagtaaaaattgactgatgggttcaccgaagcaggaaacctggccatagacccaaacaggagatgctgcctcttggcctcttcctgcagcctttgcttcctcaccctctggccttggggaagtaggccaagatcaagctaccaaagctggttctctgaaaatcactttgctgaagggcggattctccaaacgtccaattcactgaattactgatggtttttcaaagttgcagttcgtgccactgaccttttccatttcctataggaagccgtggactttctcttaaaggcatttaccatgatctcagctttggtggcttctcctgtccctggccccttcctcttctgccattttataagcaaatgtgattctctgactattttgcagacttctcccctcccctgccccagtatctctccctatctctatggaaaacggctgaattgttctgtcctagacctggcggaaggtttgcattggaagatttttgcatttggagaatgactttcagagggttggcctggagccagccttcagcagggacccactggtcagtaaccccattggctgacgtcttcttcaactcttacctcccctttgatgctcattcctctccctctcctcccttgagccccttttcccaggtgggcattcgtggcatcatccacacatgctttaaaaaaaatgacagatgggagaagtgaagacctggcttttgcactcactaaaaattactccagaacttgtttcctccttggtcttcagttttctcacttgacagttgaggggttggaccagatcaggtgttggcaccttgagggcatattcctgtggtgaggggatactgagaccagctcctatgcagcaggaagtggtaccatgatggatctggtgtctcctgtgggtgtgggaagtgggaagaaagagtacctcctacctatttgctctttggaccagacaattccaaaaagccttctggcatggacactctgaggtttcttcatgcttatgtccaagttcactccttttccctcctgcctcttacatcctctctgcggtgcactgtcctggttccccgtctcactctgtctcccaggctagagtgcagtggcatgatctcggctcactgcaacctccgcctcccaggttcaagtgattctcatgcctcagcctcccaagtagctgggactacaggtgcccgccaccatgcctggttaatcttttgattaaaagcttgggttggagaagagatagaatgaaggaggaagtcggaaaaaaacttcacatgccctgggttatgccaagcacacttacacattccttctaagcacccacgctcctcttgctgccctgggctgttcctcaggtcagggctcctgcaaacacaacgaggtctttctaacactggggtatgaggatgcctatgatttagatcagtggttggcatagacctgtggtccaaatccagtatgctagctgtttttgtaaataaaattttattagaaaacagcaaggccaagcatggtggctcacgcctgtaatcccagcactttgggaggctgaggtgggtggatcacctgaggtcaggagtttgagatcagccaacatggtgaacccctgtctctactaaaaaaataaaaaattagctcagcacagtggtgcatgcctgtaaccccagctatttgggaggctgaggcaggggaaccgcttgaacccaggaggtggaggttgcagtgagttgagattgcaccactccagcctaggcgacaaaactgaaactccatctcaagaaaaaaaaagaaaaaaagaaaacagccaatatgtacagtcatttgtgtacatattgtctgtgggtgtgtttgcgctacaatggcagagttgagtggccttaacagagatcatctgacccacaaaacctaaaatgtttactatttggctctttccggcagaagtttgctctccttggtggagagtcatcctgataccagatgcagtagcatttcagggctatgttgtgtacctagggggtagctaaatccatttgtgcaaaccaagttagcatgaagatatcaattttttaaaaatacaacaaacaggctgggcatggtggctcatgcctatagtcccagcactttgggaggccgaggcaggtggattacttgaggtcagcagtttgcaaccagcctggccaacatgctgaaatcccatctctacaaaaatacaaagattagctgggcgtggtgacaggtgcctgtagtcccagctactcgggaggctgaagcacgagaatcgcttgaacccaggaggtggaggttgcatgagctgagatcgtgccactgcactccagcctgggagacagactgagactccgtctcaaaaagaaaaaaaaatacgacaagcatctactagttattctacatacaccacatattgggttggcaaagatctaatgtctaactcgaggagtgcatcactaatggggaagacggtattacccagatgataaaaagtctgtaggctacactaggagaatgggttgagtgcagggctgtggcaggcgggatgcagtgaagagcagggaaattctgtaggaaacttcacactcaaactgggctgggaagtgctaatgcagtttcacctgtgagagacacagagcagataattccaggcaaagccaccgaggccccaaagcatgaggctcacagggaactgaagagagcttgcttcttttaggaagggtgcttatagagagggccaaaaacgatttggaggggcaggagttgaagctgaaaacacagctctccctactcctgggcctggaatttgaggctaatgagaaatagcaattctttgtgagattcgagttctatctacctctaggaaataaagagagctgaagcagttacctgggtaattggggaaggtttcctttttctggagaatttttgcattctagctgcatatgcagctatagcctttgattaaaagcttgggctgggccgggcgcggtggctcacacctgtaatcccagcactttgggaggctgaggtgggtgtatcacgaggtcaggagattgagaccatcctggctaacacggtgaaaacccatctctactaaaaatacaaaaaattagccgggcgtggtggcacgtgcctgtagtcccagctactcaggaggctgaggcaggagaatggcatgaacctgggaggcggagcttgcattgagccgagatttccccactgcactccagcctgggtgacagagcgagactccgtctcaaaaaataaaataaaataaaataaaataaataaatacataaataaagcttgggctggagaagagatagaaggaaggaggaactcagaagaaaacttcaacacaaaggctttgggtttcaatgctcacacccttccatccctcaccttcactccaccactccaagcccaaattctgtcagccttttgagtcccagctgaaaggcagtatctttcaaggcgcattttgagattcctgccccatccccatcccaccatctctatcgggggtaacttcctgtgatcactcttgttggctcacctattcatctcttatttcttaatctttatatcttattttctcctcacatgaaaagtctcttgaaggcagaatttattctttctaaaaaattttttataattttttttttctctgtggttgtggcagctaagaacaactgttttttttttatcccttaaagtgtcatgtatatagtaggttttcaccaaatactgagtatgtccataatttcgttgaagatgttaggcattcaataattctctccacttcctcccaaactgggttaattctaatcacaagatgttttgcaaatctaatctaacagccagaacccagcaaagtgattttctatgcatactacaaagggatattaatcaaatcctcttataattacatactctatagcactgcagtattaaatcataggaaattacatttttgtcgtgggtgtacaaaggcaagcacatggagtcgcagccacgtgggggtgctaaccggttgcttctattccaggttttgattactactttggaatcccatatagccatgatatgggctgtactgatactccaggctacaaccaccctccttgtccagcgtgtccacagggtgatggaccatcaaggtaatgctgtctgacacatttgcgataggctccaggacaaggcaaagttccaagactgtggtccatcagcaataaattaaagatgcagacaggaaacagttaagacggcaaataagatacacggtacattctgtgcaaatttaaatgtgttatttgcagggagtgcaagaaacctttcaacgatgaggtccacaaaattcttctattgaaatttttacaggttcctcagactattgagctcagctagggagaggcttgtgctgctagggtctcacacatgtggggcctccctcctcctctgcctgctgtctttgcttctagcccagacactggacataaggagggagggagggagagagcagaggagagagacagaggagagagagagagagagagacagaggagagagagagagagagagagagagacagaggagagagagagagagagacagaggagagagagagagagagagacagagagagagagagagagagacagagacagagagagagagaacaggattccttttgagcttctccccgcatggacaactaagccagcattctgatgttggaatgccaaacaggcaccaaataggatgttttgaaaaaacatttaatgaaatgggaaaatgcttatgatataatagtaagtgaaaaaaaaaaaaaagcaggaagcaagtcatcaacggtaagatcctaatgagctctgtaaccctatctttgtagtcctatcaacggagactcaaaggagatatgccataatgttatcaaggaatctctctggtcgtgggactcagggttttcattttcttttttctttctttttttttttttttgagatggagtgttgctctcttacccaggctagagcgcagtggcgcgatctcggctcactgcaacctctgcctccctggttcaagagattctcttgcctcagcctcttgagtagctaggattacaggtacccactaccacaccaggctaatttttgtatttttagaagagacggggtttcgccatgttggccaggctggtcttgaactcctgacctcaggtgatctgcccacttcggcctcccaaagtgctgggatttcaggcgtgagtcaccgcacccagcggtgactctttctccactttctctttattttcctctttgtcattgtatttcctaagtatcctgagatgcatttatgatcacaaaaaaaagatgataagcctcactcaggtaataaagcagcacaaaacacgtgttcccttgttcggacagagcactgtggttatttctaaggctacagttgtctgagccacttgggaaaggtgagtctcagctcgtctatctataaaacaatagttaatataatagtgggtatttattgagaaattgttacattctaagcactgtctatatttatctgtaatccacgtgaccactgtgtgaggtaggtatttcttaggttggtgcaaaagtaattgcggtttttgctgttgaaagtaaaaccacaattacttttgcaccaacctgatacctgattttacagataaggaagcttatgttgcccaggttacaccggagctggaaagaggtaggaatggagattccaatccaggtctctctgagtccagagcccatatgcccttcctatctttgctactcatagcatagtcattgaaccagcatggtggatatcacttacatgcttggtagaagtgcacagattcacatcctacccccaggtctgctttttaacaagacttatgcatgcagtgagctatgattgcatcactgcacttcaccctgggtgacagagtaagatcccgtctcaaaaaacaaaaacaaaaacaaaaaccagcccagggattctgcacattatggcatgaaaagcgaggctatagagcatcctgctgcccttcttacccaccgtggcctgctgggcatacctgtaatcacacctggccatatgaaggtatgacatatgtcagccaatctctttttaaaattttaaaattttaattaatttattttttggaaggatggagtctcgttctgttgcccaggctggagtgcagtagcacaatctctgatcattacaatttccgcctcccaggttcaagtgattttcctgcctcagtcacctgagtagctgggattacaggcttgtgttaccatgcctggctgagttttgtatttttagtagagatggggtttcaccgtgttggccaagctggtcttgaactcctgacctcaagtgatctgcctacctcggcttcccgaaatgctgggattacaggcatgagccactgcacctggccttctttttcttcttcttgttctttttttttttttttttatttcaatcctgttccttctgtatttttttatttttattttttaatttttaatctatgttaaaaatctctttttaatctatgttaaaaatccagtagaaagccaggtgcagtgggtcactcctgtaatcccagcactttgggaggctgaggtgggtggaccttgtgaacccaggagtttgagatcagcttggtcaacacaacaaaaccccatctctacagaaaatacaaaaattagctgggtgtggtggcccatgcctgtagtcccagctacacaggaggctgaggtgggaggatggcttgaggaggaggttgcagtgagctgagattatgccactgcacttcagcctgggtgacagagccagatcctgtctcaaaaaaaaaaaaaaagaaaaaaagaaaaaaaaatcaaacagagaaataatgggtggcttaggagagagagaaaaacaggaaagaatgtaaatgactcatggagttgcaatggtataataaaaagctgaaaaattcaacataaatatgcgattagtgttctaatgcccagcatggtgataattctttttctcttttaaaaaatttgggatgcctgtaatcccagcactttgggaggccgaggtgggtggattgcttgagctcaggagtttgagaccagcctgggcaacatggtgaaacccgttctttacaaaaaatacaaaaattagccaggtgtggtggcacacacctatagtctcagctgctcagggactaagatgggagtttgaggctgcaatgagctgagattgtgccactgcacttcagcctgggcgacagagtgagaccctgtgtcaaaaaaacaaaacaaaacaaaaattgtggtttttgacaattatccacacagtctgaccatatctcctatatttctgtaatggggtgtgtgtgcatgtaggtgtgatggcaagttttgatttcttcacaaatccttcccagcactattaggatgacgtatttgcctgagagaactccattcattaccacctctgtctgcattgctctcagcttctctcttggttctctttggtgaccaggactgagagcttgagatttttcagaattcctaatacactgaagatgtgtgcaatgcactaaccatttgttatctcccttagaccaccagcacccctgtaaggatggcacaggccctccaatgctacggataaggagataactctgggagcttaagtaacttgccagagatcatgaccagagtcagaccatgactcagccacattgatgggcagctatgggtcagattcatttcaatctgtaagaccaaaacttgagcttgtgttgttttgttttgagatggagttttgctcttgtcgcccaggctgtagtacaatggcgcaatctcagctcactgcaacctccgcctcctaggttcaagcaattctcctgcctcagcctcctgagtagctgagactacaggcgtgcagcaccacggctaatttttgtatttttagtagagatggggtttcaccatgttggccaggctggtcttgaactcctgaccttaggtgatccacccgccttggcctcccaaagttctgggattacacgcatgagccactgtgcctggcctggtcttgaacttctgacctcaggtgatctgcctgcctcagcctcccaaagtattgggattacaggcgtgagccacggcgtctggccatgagcttgttttttttttttttccaggagatgttattagtttgactcttattttttttccaactgctgaagtttctccaaattctgcaaacatggcttaaaattaaaattgtcccaacccatcttatgtattcctttttatgtatttatttatttttgagatggagtctcactctgtcacccagggtagagtgcagtgggatgatctcagttcactgcaacctccgcctcccgggttcaaatgattctcctgcctcagcctcctgagtagctgggattacagatgtgcactgccatgcccagctaatttttgtatttttagtagagacagggtttcaccctgctggccaggctggtctcgaactcctgacctcaagtgatctgctggcctcggtctcccaaagtgctgggatcacaggcatgagccactgcacctggcccatcttatatattctgtcctattgacagacctgctattacatgaagtcccaattgttgacttcggaaaacgctgagttgcacgccatacacagaggctgggattgaagtgagacagcagagaaagccagcaatggggctactgattggtggtgggactctgcttgacatcatttaggttctttagacctcagtttctctccccgcaaaatgcaagtaataaaaaataatgtccctagctcacgagagtctttgcaagctttacagagtggtcagctcgtccatggaacataaatatctattcaaagggaatggaagaaagcattatgcatagacttttacacttggaggaaatggccaaccagaaaaatcatttggggccagagtgttgtatttatgtgcatatgcattgttgcattaaagcatttagttctgctccgtgagtacgtaggaaatgaatactctatggtctgtggtttccacacaggaaccttcaaagagactgttacactgacgtggccctccctctttatgaaaacctcaacattgtggagcagccggtgaacttgagcagccttgcccagaagtatgctgagaaagcaacccagttcatccagcgtgcaaggtgaggagtctccctccctccgcagggcctccccctgcctccacctacccgtgcacacacaccatgtcccttggcctcagcacgcttgaggccatggcagagttttgctgctcagcagagatggatgcatacatgtctcctataagtaaagctggaaaacagccccttctggaaatctgcggtcctggattagagattcctcaggtatgttcctagagtccctggggcttatccctctgttgctttgatcacgttccactgccatgatcattttgtcctctccttctagggtacgagctcctcaagggtagggcctgcccactgcactctgggcactcaaggcatttgttgagctcactagctggcaggatgtattacttttccattgctgctgtaacaaccaaccactaatttagtagctaaaacaacagtaacttaccctgctacagatctggaggccagatgtctgaaatgagtcttagggggctaaaatcaaggcatcagcaggactgttttcttggggagtctctagggaggattccttccttgccttttccagcttctggcatttctgagctatggccatatcattctcaactctaattctgttgttcacttgcatcttcagtcaaatctcccctctggctcccacttacgatagcacttgtgatggcgtttagggtccaccaggagaatccaaggtgatccccctacctcaagacccttaacataattccacctgaaaactctcttttgccatataccgtaacattcacagattccaggaattagaccctgcttatctttgggagctatccttcattctaccagacagaagttacaaattcccgcatctagaaggcacagataggtaaccttaaagagggaagcaggatgaacgtaaggcattagggagtggtggggtctacagtgaacctgtaagcacatgccccatctgaagggggcagctactacctagctccagctgcttggtgcttctttgtgaaaatgtgaacctggaatatcacatcttttcattttacaacagagataggatacctggcttttatgtgaaatctcctgatcttgaaatattagaaactactaattaacaaaaggctgggggtggtagctcatgcctataatcccagcactttgggaggccaagatgggcagattgtttgagtctaggagttcaagactagctgggcaacatggtgaaactctgtcgctacaagcaatacaaaaattagctgggcgtggtgatctgcacatgttgttccagctacttggtaggctgaggatggaggatcacttgagcctgggaggcataggttgcagtgagccaagattgtgtcactgcattccagcctgggtgacagagcgagaccctgtctcaaaaaaaatataaaatgaaaaataaaataaaataaaggtaaataagaaaaacaaagaagtgggctgtgtgcggtggctcctacctgtaatcccagtgctttgggattacactgggtaatcctccaggatcgctcgaggccaggaattccagactagcctggacaacctggtgagaccttgtctttacaaaaaattataaaaagtggctgggcgcggtggctcacgtctgtaatcccagcactttgggaggccaaggcaggcagatcacctgaattcaggagttcgaaaccagcctgaccaacacggtgaaaccctgtgtctactaaaaatacaaaaattagctgggagtggtggcacccatctgtagtcccaactattttggaggctgaggtaggagaatcacttgagcccgggaggtggaggttgcagtgagcccagattgtgccaccgcactccagcctgggcgacagagcaagactctgtctcaaaaaaaaaaattaatacaagttattaaatagctgagcatagttgtgtgaatctgtagtgccagctaactcgggtggctgaactgggagaatcacttgagtccaggagttcaaggctgcagtgagccataatggtgccaccgtactccagcctgacacatggagagcctgtctcttaaaaaacccccaaaaccggctgggcgtggtggctcacgcctgtaatcccagcactttgggaggctgaggcaggtggatcacgaggtcaggagatcgagaccatcctggctaacacgatgaaaccccgtctctactaaaaatacaaaaaattagccaggcgtggtggcggacgcctgtagtcccagctactcgggaggctgaggcaggagaatggcgtgaacccgggaggtggagcttgcagtgagccgagatcaggccactgcactccagcctgggcgacagtgtgagactccatctcaaaacgacaacaacaacaacaacaacaaaactaccccaaaacccaaaaaacaaaaaagcaaaaacaaaaccataccacagtctatctctaataaatcatatacgtgtgaggtgtcagggcaaagaatggacattgtgaaataatggacaactccaaaattgtgcacacttatttggaatgcacacccatagactgtggggtgcaagtgcacacacacacgtgtacctgcacacatgcacacacagtcaccctccccgcccccttcataactgccttctgctgccctctaatgaccccatatatgttcatcttatcttcctcctaggagattccactcctcaagggcaatggactccaagaaacttggtgttttctacagccttagcctaagtggtcaagaaagcacgtgctgcacggctgtccacttgggcagaattaaaaagggactctacctgtggctaagtgatcacagcagccccttgaatatgcaggaatcccccacccctcgctcagccacattggacgtttttagaagctcagcagggagggttgaggcagcaatgcaggagatccaggcatcctgttttcttggtaataaaacctatttaaggattgaatctcaaaagcagctcctaagggcttcagaaattgcatcttaagggtttatcaggactttctgagaacactgttgttttatttcagattgtcaatagtagaaagggcagagcctcttctgccatctggagggttgagcgtctcccagctccctggaactttgggatggtttcgggcccctgtgccccatggcacgtggatgcttcaaggctagtggggacagtctcttctgcttttgtggtgactcaaacgacactgtgttcttaggggaaggaatggggactcggggccgtttaatgccccctccgaagtgggcatagggcctggacatccacccgttaattaatccattaaagggcaaatcaaccgacagcctccttattatacaaaaaaggggaacagttttgttaattcattagctggttattaagtgaaaagtcccgagtcctgttggcatttaacatcacagaaggaaatccccagaaatgctgatttctttgggatttccacatgccaaatgattttctgagcatcagcagaaaaggccctcaggtccatgcccttcctcctccatgactctggcccctgcctcaagcccctcccccaccttggacctgtttttcaaaaccaccagctgtccctagagtgtggcttcccgctcttccttgacaagggggcccaccctgggacttagggagtttttacttgggtctttagttggctttagtgtttcacccaagaccctcgacgtagtacttggttatcactgctggtcattcagtttacttgactttagacccttcatctggtagcaatgctgaatgctaatgcttgattggagttttttaagcagcaggcaaatctctgaatgggaaaaggagccggtagaaggcatgactcctgggtcacagagctagctgggcctctgttccttttgaggtctgggaccgtgcattgcacctacgcgggcaatacagggcttgataagcaggagtgtatcgggcatcaggatgagcagcggcccagcatgtttgaaatcagacatttcttagttttctttttttgagactgagtctcgctcttgtcacccagactggagtgcagtgttgcaatcttggcgcactgcaacctctgcctcctgggttcaagcgattctcctgcctcagcctcccgagtagctgggattacaggcgcccgccaccacacccagctaatttttgtatttttagtagagacggcgtttcaccatgttggccaagcttgtctcgaactcccaacctcaggtgatctacctgcctcggcctcccaaagtgctgggattacgggtgtgagctaccgtgcccggcctgaaatcagacctttcaaacaaatcaatcttccatggtgtcatgtactacacattgaaatcctaacccttaatggggtggtattaggaggtggggccattaggaggaaattaggtttagataagatcatgagagtgaagcccccatgttgggattagtgtttgtattaaaagaagagaaagagactctggtgtgctctctcctggccatgtgaggatacagtgggaagacacttgtctgttaataagccaagaatcagccccttaccagacagtggacttcccagcctctagaactgggagacgtaaagtcaggcgtggtggctcatgcctgtaatcccaacactttgggaggccaagggtaggagattgcttgagctcaggcgttcaagaccagtctgcacaacatagtgagaccacccccatctctacaaaaaacacaacaaaacaaacaaacaaacaaacaaataggtccttctgcagtctagaacctggaaaaagaaaaaaaaggccaggcacggtggctcacgcctgtaatcccagcactttgggaggccgaggtgggtagatcacatgcagtcagaagaagttcgagatcagcctggccaacatggtgaaaccccatctctattaaagatacaaaaattagccggtcatggtggcacatgcctgtaatcccagctacttgagaggctgaggtaggagaatgcttgaacccaggagacggaggttgcagtgagccgagatcatgccattacactccagcctgggcaacaagagcgaaactctcagaaagaaccatgacaacaacaaacaaacaaaaacaacaacaacaacaaaacccaaaaaacagaattgggagaagtcgatggttgtatactaagccaccccagggagtggtattttgttatagcgtccctagcaggctaagacacaggacacgcatcttttggaactaggtcctcaggatgcagagatgaaagacatgttccagccttcatgagctcatgcctgggatctgcagaattctccgttttccttgactcactatccgtcttcattgctggcccccatgcttgcctaagtgcccctgctgtggtgctgccccctcctcatcttgcctctcacccggctcccacccgacaccaacctatgtcagggatccaggttcagatccaaagaccatactcacccccaacccctctttctcctttctcctgtttgaatgcagagacggatctctagtgagtgagagaataaactaatgactagcgaggcaatcatatcgaacgtctcccccagggctatgttctctgccttgtgtggtcaccacacaccgtcctccaggtcccactgtctcagggatctttccctcccctccacaccccaaaccccatttggttcccctgttacaccttccacagcaacttgtatttctcttccatctctcctacgggctgagtattccgtatctggaatgcttgggaccagaagtatttcagattttggatttttaaagagtttggactatttgcattatacttaaccggctgagcatccctaatcctcccatgagtatttcctttgagtgtcaggtcagtgctcaaacagtttcggagtttggagtattttggattttcagatttgggatgcgctgcctatactaactttttaaataatcatcttatttatattttagttgcctttttctctttcctggtctcaattagatgttaaactccaagagggtggaaatcatatctattgtgctcattcctctgtccccagtgcccagttagagcttaataaatatttaatgaatgaatgaatgaatgagtgagttacttatccagctccagtgatgtgctggtgctgtgccagggattcaaacgtgaattagacatgtccagtctctgagtgattcccaagctagtggggaaacagatatgtaaaaacatggctttaatgcaggttgtttgtatcttattaataccgcaagaagcagggaaaagggctatggcagggatgggggcagagaggaggcagccaaccatgacctgggagcaaaggaggaggactattggtggctttggaattggatcttaagaactgattaagtgttttggggcaagataacagggagaatactgctgagagaggaataacatagatgaggcacaggaagtaggtgaggtgcttgggacactggcatatagaaagagtctttgacagggaaggaaggtcaggctggaagggacggagatagggaaagctgcaaagactgggtgaggagtttggattgaccctgcaggctgcaatgagccctagtacgtttcttttgtttctttcttctttcttttttgagatggagttttgctctcgttgcccaggctggagtgcaatggcgcgatctcggctcaccgcaacctctgcctcccaggttcaagcaattctcctgcctcagcctcccgagtagctgggattacaggcatgcaccaccatgcccagctaattttgtatttttagtagagatggggtttcttcatgttggtcaggctggtctcgaactcctgaccttaggtgatccaactgcctcggcctcccaaagtgctgggattacaggcgtgagccatcgtgcctggccgagccctagtacgtttctaaatagagatctgccagatcaagtctgggttagagaaggttgtctgtgatgccagggtctagtggaagatggcaaaatggtggggcgggggacaagtggttattgcagcagtccatttcagagagaccccttgcccatccatccccagggagccaccaccagagaggccagtgggctgagagctgcaggtgttcatttccccctgcatgagggaagccctgccttcacctccaggcctgcctccctccacccaggcaccatctggggacacttcttgagagatgggtgcctctcacctgccctcttccatttcggatcagatgattttccccagccttaacggtccctgcaccataatcttctccacaccctgtctccacaccctgccccatcctcttgctctcctggaatgtcccctctgtcatcttacttgtttttttccttctctactcaccattccacttgttttcccacaaaaatagcatgtgttccctttagtaatctcggaaaactgagacaagcaaacaaaaaaaaatcaccctgaattccatcccagagataacctgttttttgttgttgttgttgttgttttgttttttgtttatttgagacagagtcttgctctgttgcctaggctggagtgcagtggcacaatctgggctcactgcaacctccgcctcctgggttcaagccattctcttgctggctgggattacaggcacgcgtcaccatgcctggctaatttttgtatttttagtagagacagggtttcaccatgttggccaggctggtcttgaactcctgacctcaggtgatccacccacctcggccttccaaaagttctgggattacaagtgtgaggataacctgttttaatacctccgagtatgttcttctagcctcattctatgctggtgcataaacatatgtttccctggttttattaaggtatagttgaaatgaatgtgttttagaaaacaaaagtggagtcacactgtgatataatcagtatttttttaaagcatcaggtgtccccccactctattttccattcagcacaggtgcataatgaagaggtggcttgcgggacagatgcccccaagggactagtctgtgtgggctctgcctgatgccatgttttggaatctagcctggcatcaggatgcagggagagaggtacatccttgggcatcatttatgcttactactgctggcatgtattcaacattcttaacaaggaagcggtcgggcgcagtggctcatgcctgtaaccccagcactttgggaggctaaggcaggcagatcacttgaagtcaggagttcgagaccagcctggccaacatggcaaaacctcatctctactaaaaatacaaaaattagccaggtgtggtggcgtgcatgcctgtagtcccagctactcgggaggctgaggcaggagaattgcttgaacctgggaggcggaggttgtagtgagccaagatcgcgccactgcactccagcttgggagacagagcgagactccgtctcagaaacaaaaaacaacaacaaaataagctaccatttattagatgcttagtgtgggaagttacacaactttgttggggaggtctgattgtccccattttatagatgacagaggttaagttaattgtccagggctacacagtcatgaaataacaaatctggaggtttggatgcaggattctcaagcctgtgctcttcatcagcctgtgctctgccatctctcataactgcctgtctctgtaagcctctggctcagggtgctaatgtgactttgataatgggtgagagtttggaagatgatgatggatgatgaagggtggacagcaggaccacccctcgcccatacacatggtgagctgatttctaagaaaacagctgcagtctgtagcatttgccaattcctgaggtgtaaatactcaatctcaccatggctgatttccagctatggagatgtcaccgaatatggcattgaaaaatgatgggcagtagcaagccattgtgtgttatttccaccacacagatacaatagatgtaaataaccccatgagcctacatcatagcagaatgtagtagttgggaagtgataaatggtgagaatgtactactttcaaaaaatattattgatttatttaatttattttttttttgagacagagtctcgctctgtcgcccaggctggagtgcagtgcacaatcttggctcactgcaacctctgcctcctggtttcaagtggttctccctgcctcagcctcccgagtagctgggattacaggcacctgccaccacgcctggctaatttttgtatttgttagtagaggcagggttttgccatcttggcccagctggtctcaaactcctgacctcaaatgatccgcctgcctcggcctcccaaagtgctgggattacaggtgtgagccactacgcctggcaaaaaaataaaataaaataaaatttatttaattgtggacttttataattgaatttttagcaatggccatgtttaacaactggtttgcaaaatacttgaaatttgagccagatctaggcaccactgcaatatggaatctacctgaaaattaaaaaaagccacccccactggccaggcactgccctgtgcagggtaaccagccagtagattgtaagctggaaataaggacccattcactcagcaggatgtcctgatgcaggccacaacctgcacaactgtacatgaccatccctgggagagttggcatcaggcactgcaaatcattgctgtacgaaaaaactaggcaagaatggagatgttttctatctgcactgtccaagctgctagcctctagccacctgctgctgctgagcatttgaaatgtggctaggaatttatgtatgtgtgtgtgtgtgtgtgtgtgtgtgtgtattttattgtgggtatgtatatatacagatatatataatcataaaatgttaccatcttaaccattttaaatgtaaagttctgtcgcattaaacattcactttgttttgcaacaattaccactatccatcttcagaactgtttcattttttctaactgaaactgtacccatgaaacataaactgcccagtttttcttccccgcagtgccccgccactcaccatcctaccttctctctatgaatttgactattatgggtacctcacacaagtggaatcatacaattatttgtttcttggtgactggattatttcacttagcataatattttccgggtccacccatgtgctagcgtgtgggccatggaacttttaatatgatttaattttcattaatttaaatctaaataggtacatgtgacttgtggctgctgccctgaacaacacaactctagcaatgttgcagagaaagtgtggattaaaatggggaaggcagacgcccctgtcttgggacttgtgtccagggttttatgcatagcaaagagaactgagtgcaagcacagtcccaggcggcagaccctgggagccagggtgcaggggggatttgagggcacagttggctatagagcaaggctgtaaggtggtgtaaaccagggtgagctaaggagaaccctggggccaactgaatctctgcgtgaactagtatgaaagggccatgcatctacccccaccagaatgttgttgactctgtactctcccaatacccttgtttggtgtcctctgaaagaccccccatggatggatctgtgggagaggggccccctgaaggtccctgccaccgttgtgattctgcagctgctcttggctgggagtaggactgggacctttgcttggaagccacgccagctccctccaagcctttcattctgcactttccagggaaatcaggatgagtacagaggcagccgaacaacaaggcctctgacagatccctgatctagatgttacctggtggtcatatgtgtccttgaaattcctgtgatcaacttgagacaaccatttatctcttagaaaggaacaaggctggccaggcacagtggctcacgcctgtaatcccagcactttgggaggccgaggagggcagctcacccgaggtcaggagtttgaggccaacctagccaacgtagcaaaaccccatctctactaaaaatacaaaattagacgggcatgggggtgggcacctgtaattccagctactcaggaggctgaggcgggagtatcgcttgaacccaggaggcggaagttgcagtgtgacaatatcgcgccactgcactccagcctgggcgacaagagtgcgactctgtctccaaaaaaaagaaagaaaggaatgagaggctgagaatggacaggatagtctggatgctgcaaaataaaatttaaaggtgtgtgtgtgtgccttagactttacagtgtggcagttaagagcaagattcggacatgtaactaattgcatatcctgggcaagtcctttaatctctaagcttctgattcttcatctgaaaaacggggctatgatgaggacgaacctagacaatgtgattcccatataataagctctcagtaaatgataagggatagtaactgttattacaattctcatttttaattggctaaccagattgctttcacatttccttggaagattctggataaatgtgtccttcttgagcccgtggggcagaaggagctttggggattttcctggaggagagggaggatccctgaggcaccagatgagccaggagagccttctgcagagtcacctcttggttctcctgtttcagcaccagcgggaggcccttcctgctctatgtggctctggcccacatgcacgtgcccttacctgtgactcagctaccagcagcgccacggggcagaagcctgtatggtgcagggctctgggagatggacagtctggtgggccagatcaaggacaaagttgaccacacagtgaaggaaaacacattcctctggtttacaggtaaagtagtaaaagccagccagcctaactgccatttaatagacaaccttgcacattacctgtgaagagcagagtctggccccgtgatcccctttcataggtcaggaggcttgctttgaacttgtggcccagataaggcttgctggcctgaatgctgagcacctgtccattggggcctccaaggccaagtccctggaaaggtttgcacacacagagcagccaccttgctggcccgttgtgtgtcgattcaggctatctgggtattgctcttaattgccattgaatgacattgacattgtgagcctgtgttgtccctgtgcagttctaagatttccctcttctccatcttccctggtcccaaagattctacttgctgccactccccgtgtcacgtcttttggctgagtggccttagcgagctgaactagtggcctctttaaaggcctcacacatgcattgtgtattttaggtttctgtctggagcgactgcagaggttataagcactgcttttggccaggttgactcacacctataatctaataacagcactttgggaggctgaggcaggcggatcacctgaggtcaggagttcgagaccagcctggccaacatggcaaaaccctgtctccactaaaagtacaaaaattatctgggcatattggcacacgcctgtagtcccagctactctggaggctgaggcaggagaatcgcttaaacctgggaggcggaggttgcagtgagctgagatcgtgtcactgcactccagcctgggagacagagcaagactctgtctcaaaaaaaaaaaagcactgctttcgggtcaagtagagacttatactctctaccgtgcagtgaaggtgttataaactcctacagggtttgaatctatactctactattgggggaattcccttaatctctcagtctccttttcctcatctgcaaaattaagctaataaccgaatctactccatagcatgttggaggattatgagatgatgtatgtgaaacactgggtgcataatagatgctcaataaacagttgctgggctgaagctgatgacggtggcaatgagattgctgaaaccttacaaaaaggcaagagaggaaagaggaaggaagaggaggaaaggcaaggaaggcaagaggctcacgatgggactgggttggggcaggaaaaggccacctgtctctgaaagcccagtagagacacatctcatatcaagggttgttcttcacggatgggaatcatatttgtctttatttatttatatttatttatttttttagatggagtcttgctccgtcacccaggctggagtgcagtggcaggatctcgcgtcactgcaacctccgcctcctgggttcaagcgttttttgcacctcagcctacagagtagctgggattataggtgcccaccaccatgcccggctaatttttgtatttttagtagagaaggggtttcaccatgtcggccaggctggtctggaactcctgacctcaagtgatctgcttgcctccgcctcccaaagtgctggattacaagcgtgagccactgcactaggcccatgtttgtctttataagtcctttttctatctagttcctgctctgcgcaagggatatagggccagagtgggagggtcagcgaaagtgtccaaccagcctggtgaccattaatgctttttctggtttctaggagacaatggcccgtgggctcagaagtgtgagctagcgggcagtgtgggtcccttcactggattttggcaaactcgtcaaggtaaggggctcagctggggttggtggatcccattgcaatgctgagcccaggctggggtgtgggattctgcctccgggtgggggacaacttatatctgggccttagggtcatcattgtgaaacagggacacatttgctcaccagccaccagcacccagacaagaaggaacaagtagtggtggagaaaacgactgctcagtttggaccatccctgtctctcctttcctcctagaacttcccaaaggcgaccagccctccacccaacgagccagtctacctacaaacattccaacaaatgagctttgtctttactttcatcctgttcccttgctcttcctccttcctttttaaaacttcatccctccatccatctaaccattaatttatttcatccattcaaaaaatatttagtgtacaactgtacaaggtttttaatgtacattgtctccagttcttacaagagtgagagggtggcagtcatagctccatttacagatgaagaaaaagagaggctaggccgggcgcggtggctcacgcctgtaatcccagcactttgggaagcccaggccggcggatcacgaggtcaggagatggagaccatcctggctaacacggtgaaaccccatctctactaaaaatacaaaaaattagccgggcgtggtggcgggcgcctgtagtcccagctactcaggaggctgaggcaggagaatggcgtgaacctgggaggcggagcttgcagagacagagctgagatctgcactccagcctgggcgagagtgtgagactccgtctcaaaaaaaaaaaaaaaaaaaagaaggagagaggctcagagagggtaagtaatttgcccatgtcacacagtttgtgaggagggagccaggttttccactgaagttaaagttggtgctcgccctgttgtaccataatgcttctcacagctgcctctgtctctatttcaacatcttccaacttccaactcagctcccatctgctctgggagagctttgccacaaggacctcactttctgagactgcagccatgttggggacaatttgacatatggaccaaatgcttgaaaaatacgcatatcatttgatgcatcaattcctcctgtaagaatttgtcttaaggaaataattaggcacatgctcaatgacatacgaaaaaggatgctcattgcagtgaatttttttcatagttggacataacccaagtgtctagtaagaagatagtgcttaaagaaattattatacctccattaaaaggaataacaaagaaccactaaaataattcatatttattgacttggaaacatttacatgaaatatttttaaatgaataaagcaggttccagtatggaacaatatgtaaagtatgattttattatataaaaataatcacatgtagactcaaaaaaatcttgaaagagtcaataaagggtaacaaaacattagcaataattacctctgggcagcggagggagagttgaaggggtgaatttccccccacaataaactggtattgtttgtttcatataaattaaatgtttaggaggtatttgtgtccaagaggttcagaggtggacctggcaagtttaccctcattgagggatgtgtggggcagaattttagatctgggactgtgtattagtccacagactaatacacacaatcgcaccattcttgaattagagggaaccaaaaaggtctatctgtctgtctgtctgccagttctatctaactgtcatctatctatctatctatcaattgatcgatcgatcgatcgaaacaccaatactccaagagataaaataaactcacattgctataaagaactacctgagacagggtaatttataaagaaaagaggtttaattgactcacagttctgtaggctgtacaggaagcatggctagggaggcctcaggaaacttacaatcatggcagaaggcgaaggggaagcgtgtatgtcctacatgtttggagcaggaggaagagagtgaaggggaaggcgccacacacttttaaacagccaaggctaatgagaattcactcaccatcatgagaacagcaaagggaaaatccgctctcatgacccagtcgccttccaccaggcccctcctccaacactggggattacaattcgtcatgagatttgggtggggacacagagccaaaccgtatcaggctgttttccctgctgtcaaactcaatcctgacctatgaccctcagctgtctccaggaggtctccactagcactcccgtcatcgtattagtctggcaggataattgtagttacctagaaactgaagcattgtgcgcctcaattctggtgcagagaaggaaatgctgattttttttttttttttttttttttttttttttgagacagagtcccactctgtcacccaggctggagtgcagtggcacgatcttggctcactgcagcctccacttcctgggctcaagcgattctcctacctcagtctcccaagtagctgggattacaggtgtgtgccaccacgctcagctaattttttgtttgtttttttttgtttttgtatttttagtagagacggggtttcaccatgttggccaggttggttttgaattcctgacctcaagtgatccacctgcctcggcctcccaaagtgctgggattacaggcatgagccaccgtgcccggccatgatcatttttatttttcaatttttttttttttgagatggagtttcactcttgttccctgggctggagtgcaatggcatgatctcggctcactgcaacctccgcctcctgggttcaagtgattctcctgcctcagccttcctagtagctgtgattacaggcacccaccaccacacctggctgattttgtatttttagttgagatggggtttctccatgttggccaggctggtcttgaactcctgacctcaggtgatccacccatcttggccttccaaagtgctgggattacaggcgtgagccaccatgcctggcctacttttcaattttaacctattgtcccttggatcagatatcttgagaactttaggagcaagtggctgcaggactgtggccatatcttgtgtctggaaatttgagtcggggtcaggagagctgagtaccacctcccactaaccttttcagtgaccagattattttatctcttggagtattggtgtttctcactctcactctctctctctctatatatatgtatagatctttttggtcctcttcagttcaaaaatgctgtgatttagttgtgatttctggagagttgggtcaaaagaagatgctaaggaggactggaggtggatgggggtgtgtcaagaaacaggagccagccaggcgcggtggctcacacctgtaatcccagcactttgggaggccgaggcgggcggatcatgaggtcaggagatcgagaccatcctgactaacacggtgaaaccccgtctctactaaaaatacaaaaaattagccgggcatggtggcgggcacctgtagtcccagctactcgggaggctgaggcaggagaatggtgtgaaccagggaggcggagcttgcagtgagctgagatcgcaccactggactccagcctgggtgacagagcgagactctgtctccaaaaaaaaaaaaaaaaaagaaacaagagcctagagaaatacagcataaatgggagtggtttgttgcattagctgattacaattcctcctttctgtacctgggacactcttgggccaggctgtcatcttcagtgttcagttagaaagcctggaatagcctggtgtcagaagccccaaggctaaaagtccagaaggtgcagaaggtgtggagaccatggatgcagggggaaggatctgtaagtaagtggcttctccgtggggagaagaatttacctactgatctcctatctgaggacttgccttattgatctcttctctctttatgaggcagttttgaaatagtgagtcaggcttaaggatgtggactgggaccccattcttcgagggaatgatgagaaatacatttactagctggccaggtgcagtggctcatgcctgtagtcctagcactttgggaggctgaggcaagaagatagcttgaggtcaggagttcaagaccagtctggccaacatggtgaaaccccgtctctattaaaaatacaaaaattaaccaggtatggtggcgggcacctgtaatcccagctactcgggaggctgaggcaggagaatcacttgaacctgggaggtggaggaggttgcagtgagctgagattgcaccactgcactccagcctgggcaacagagtgagactcagaaaaaaaaaaaaaagaaaagagaaagaaaacagaaaaataaaaataaatttactagctgggcaaccaccatctctcctttccttccttcctcctgtaagcattcgttgagtgcctactgttttctattcctcctatttgttgagcacctactgtgtgccaggaactatgcttagtgctggtgccacaaagatcaacaaagccccagccgcaaggaataatagtctagaatagtgtttctttgattttaatatgcagacagtcccctggggatcttgctaacctacagttctgacccaagagggctgggttgctgatgggagttttgcatttctaaggttctcctaggtgacgctgatgtggttggtccagggaccaaactttgagaaccaccagtccagaacatctacatctagaccatgagtctagaatcatctgagtgtagaactttcaactttagaccaatggttatcaaagtgtggtccctaaccagcatcattagcaccacctgagaaattgttaacagtacaaattttagggcttcaccccgggccaaaagaatcagaagcactcaggatgggtcccaggaatctgtgtttaaacaagtcctttgggcgataatgcaggttaaaatttgagaactacctgtctagagctacacagtctggtatgtcaggcactagctacatatagctatttaaattaaaattaatacaatttaattaaaattcaattccttggtcacaccagccacacttccagggctcagtagccatatgtggctagtggctaccatattgggtagcaaataggcttccctgggggtgatttgtgttttgaagaatgagtaggagacagccaggaattggcaggagaagaggctctgggcgagggcagcagcccgggcaggggtgggaacatcggggagtaggagccgctccctagagctgcccctgtgtctgtgagtctggagtttgtggcgaccaaggagaatagcgagagatggggccagcgttcaacgatcttttcagtttggcttttattttaaggaaatgtggaaccatgggaagattttaagagtgggagggacattatttaatgttaaatatggaggtgaaatttacatcacataaaattaacattttaagttgttcagttaagtagcacttagcaccttcccaatgttgtgcaacgaccacatctgtctagttccaaaacacttttatcacctcaaaagaaaaccctatatcctttaattaattaattaattaatattttagagatacagtcttgctctgtcccccaggctggagtgcaatggcgcgatcatagctcattgcagcctcaaactcctgagctcaagggattccccccacctcattctcctgagtaccttggactacaggagtgtgccactgcgccccctgcatttttttttttttttctgagatagggtcttgctctgttgcccaggctggagtgcagtggcatcattacagctcactgcagcctcaacctcctggattcaagcaatcctcccacctcagcctcccaagtagctgggaccacaggcatgcaccaccatacccaactaatttttctttaccttttaaaattttttttgtagagacggggtcttgctatgttgcccaggctggtctgaaactcctgggctcaagcaatcttcccaccttagcctcccaaaatgttgggattacaggtgtgagccactgcacctgtcctatgcctagcttttaaaatatatatatttattttatttaaccccatatcctttaaacagttgctcaccatttcccactccccctccagcatactattcaatttttttttaaaagatccctcttatatcaggggagctgagaacaaggagaagggcaagtaccagcctcatttccactgatccaaaatgaccaatgagagaagccagtgacaaaatctccaggaatatccccaagttcaaagaacgccaaagttggaaaagacctcagtcatctttttttttttttttgagacaaagtcttgctctgtcgcccaggctggagtgcagaggtgcgatctcagctcactgcaaactccaccttccaggttcaagcgattctcctgcttcagcctcctgagtagctgggattacagacgtgcaccaccacacccgccaccatgtctggtatttttagtagagacggggtttcaccatgtcggccaggctggccttgaactcctgacctccagtgatctgccctcctcagcctcccaaagtgctgggattacaggcgtgagccaccgtgcttggccgacctcagcgatctttattccaaccaccttattggacaaatgaggaaactgaggccaaggagaatggaaggcatccccgaggccagccagcaatggaggggtccacatcctctgaccatcactggctcattctccaagtcacgtgactgctctcacgcacaccttgttatactcgactcctcagccacctggaaaatcctatcttgctctttgaacctagcaattgtcaaggaaaagtctttagcccttgcaacagtctgaatctttctacatcggtgggaggcagagagggtttggaggctcaggctgggcttgaatcttgactcagctcagggctcagcatcctcttctcattaggtggggttgtggaccattctccatggactgttgggagaatcagtgggggtactgcccaggaggctcccagccttgcacctggcctctaatgataacccccattagactaaatttcttcattcctggctgaaacaacctggcggaaccccacccatagaagcattagaaggggattggcaaacaccctgaaaaagattcccccacaaaaggatcaggcaacttaaatcgcatacagataactttaaaagtgttcaggaactcttgggaaactttgttctgaagctgaatttcaggcacctcaagataacattcttttttggggcaaggccttcccagtaactctgatgtgggatcggtgggtgacagcacttgaattcatgatcgggctggggctggatgccattgccctcttttcttgggagtctgaaagtgaactttgcctgaaaggctgctgcctgggggtaaatacttcttcttcctcagtctccaaagcggcttcctgtcaactaactattccacagcctccttcttcctctctgcctggaatgctgctggagctctgggaagccaggcagcgccctgctcagcaggtggccatgtcctgtgagtcaagggggctggggtccctctggtcacctgctcctcttcacccagttccccatcagtgggacatctgcacggctcactgtacaggggccagactcaagagcagatgaaagagagaaggcggtcaatgttttcgcaacggagtaggacaaacagtacccggagtcgtgcaactttctccctgaagccaggctgctgcgtcaggccacgtgctgtcttcccctgttctcagggcccccaggcccccctgcttgtcttccctttcctttcctggccgagccgcccagctcagctgatgggatgaggcagcgtctcctggagtcatcttttcaccccgtgcgtgtggactgagaatgctccacttggcttgtgccctgcaggggtgaggagaaacggaactggggcgggggcagagcaaagcagccctgccttctcccgaagaagaagggcacgagtcagacacccctgctgtctctgagtccacagcctggtccaggaggcctggctctcccagcagccgccttcccttctccatgccagatctgtttcctacccaggacagaaccaacaccttgtttttcccctaactgactgctcctctgtctggaaaatcttttctcgttttatttgaagagcagaactgttccttcctcccccttggtgatgaggaaacattctgttgaatttggcatccaggctcctaggagaccttggttgtttgtaatttgatgctatcaggttgttgcataacctttcccgctgggaagcagtctctgcatcctgggccttctgtccagtttggggtcgggggtggggcggggaaaagtcagaggtgctgtgaggtgacagagcaagggataagggactctggctgttggccctggctggggacagggcctgctgatagggacctagaggaagtcaaactgcgtctctttctgggcctttggccaccaggcttggtggaatgtcctcatcccatactcagggccaccccaggccagccggagtcctgggtctgaatagaggccaggccgccctgtgtttctagaaaacgagtacactgtaggcatccttggcaaggggacatactacacttagaaacaaagcctgcttctttattttatttttgtagagacagggtctcactctgttgccctggctgcagtgcagtggtctgatcatggctcactgcagccttgacctccggggctcaagcaatcctcctgcttcagcctccctagtagcttagtagctgggactgcaggtgtgtgccaccatgcctggaacactacaatttttttttttttttttttttttttttttacagagatggagcagaggggtcttgcttgttgcccaggctggtttcgaactcctggcttcaagtgatcttccttgcatcggcctcccagagtgctggtgttacaagtgcgagccactgcactgggctgaaagcctgcttctttagaaggttattagaatgtgcactcctcagaacaggcactctacccagtcacaaatgctaatgcctttgtgggccaggcaggtgatataaaggaacacatgtttgtttttgtcagttatgggcagtgttaggaattcaatatgctggagagaggaccctgtcgaatgacattcagcattagttaaatgaaaaacactaggcatgcccaaccaaactgtcggaggttgtgatctctgctattttctccctacaggtaatttggttggcacttctctggcaggcattatgcaaaagtaccttgcttgaagctttatgtacactgtcttatataactgttcccacagccctgtgagatacgtacaactgacctttgagcgacacggatttgaactgcatgggtccacgtaatacatgaattttcttctgccactgccacccctgagacagcaagaccaacctctcctcttcctcctcctcttcttccttagcctactcaacgtgaagacaacgaggatgaagccctttatgatgatccacttccacttaatgaatagaaaatatattttgtctttcttccaattttctttttccttccttccttccttctaccttccttcctccttccttccttcctttctctctttctttctttctttactcttttttttttggacagtcttgctgtgttgcccaggctagagggcagtgatctaatcagagctcactgctgcctcaacctcctgggctcaagcgatcatcccacctcagcctcccaagtaacttggactaccagctaggactcccaagtagctgggactaccacacttagctaattatttatttatttatttatttagtagagacacgggtctcactatgttgcccagtctggtctcggactcctgggcacaagccatcctcctgtcttggcctcccaaagtggtgggattacaggtttgagctactgtgcctggccaggattttcttactaacattttcttttctctagctcattttattgtaagtctacagtatataatacatgtaacatactaaatgtgtcttaattaaatgtttatgttattggtacggcttcctggtcaacataaggctattagtagttaagttttgggagagtcagaggttatgcccagattttcaactgcttgggagtcagtgccctaactcttgtgttattcaagggtcaactgtacaatcgtttccctgcttcctggctgagatgattgagactgagggaggttatgaattctgcccaagaccacttggttggcaggggtggcactggagacctgcctgcccccaaaggcatcatcctaattattccttgaatacttcttcaactctagttttcaaaccactgacatcagaattacctagaatcagagccccaccccagacttattaaattagaattcctgggaataggacccagaaatccatgtcttagatgagatctcatctggtgattctcttgtatggagaaatttgcgaatttccttgtttgctgcattgcctttctgactcagtgaaacatggcccttgggtcccagccaagaaagaccactgttcctccgcgtgggcagtggtgagtcttccccggcctgcccctgtcttcatgcatcataaaatgccacttcacttccgtaaccagagaagcacaaataagcaaattcatgaatcatggttttgttgatattttggttgctgtggctaaatatttattgctttaagaggttctgctttaattagagtcacaagtaaccacaagtgcgtagaaatgcattctcatggccataagacacgcatttctcgacagaaagccgaaggcaactaacagttttaatgtgccagtgcctgatcaaagtatggaggcttatctaaatgaatagtgtttgaaattgaaaagtgattagaagtttcatttatggattgtctattgttcttactatgacttataaggtcatatttatgatgctatggcatagaggtataaagtcgtgggcaacagaaagcctgcagtgacgatgactattagctacatttaactttgaaacgtgctgtgttctcttcccgatcttgccccttgccctccttccctgggaatgagtgctctccccactaaatccccaggagggttttagaagatattgatgtcagagcttcactgcaggtcgattaaatcacagtctctgggaaagagactttggcatgcgtattttttaaaagctctccagtgattctaatacatattcaaaatggaaccacctccctaggtttagtgagtgagggtgctggctgtgtagtcagaccggcgttcacatcttggctctatcattttctttctttcctttttttttttttgacagagtctctgtcgtgcaggctggagtgaagtggctcaattttggctcactgcaacctccgcctcccgggttcaagtgattctcctgcctcagcctcctgagtagctgggattacaggcatgcgccaccacgcctggctaatttttgtatttttagtagagatggggtttcaccatgttaggctggtctcgaactcctgacctcatgatctgcccacctcagcctcccaaagtgctgggattacaggcgtgagccactgcacccggccggctctatcattttctagctatgtgacttgggggcaaattacttagcctctctgagctttggtttccccatctgaaagatggggacaatagtggctaacttgagaggttgtcataaggattcaatgagataatgccaggaagcatgtatcatgctgaggagcacttaacttggtacttagtaagggctcaataaatacgagatgttattgttgttgttattactattatgtttaacttagaataactatccattagtgggagcaggtattactgaagaatattgggggatcaggagtagctatcctagaatttagcctttgctggtgcagataaaacacaacacgcctgtttgatataagcatatgcatctcataattagagtacacaatcctaggggccgatagaatgccagtcagatctttgtaagttttgtccactcctagcagtaccagtgagaagctgagatttatagcaagacagtatctgcgctgttggtgacacataaatattttacaattgcctgttcacactctagacccttttaagataaatccctttagaatacaaggtctgtggacctgtgatcatttgggtggctggcatatataattgtgtcttcctgttagagccagaacccaggatgtagcctgcactaaccaactagtctgtacaacaaaaagaggggattgctccttaagtggccacactgagaggcttctctcagccaatctttttctttctcctaattcctgaatcttttgcaaggagattgtctgctttgttgactacacctgttttataactagctggattcctccaaacccctccagctttcagtcctttgctgaaataagacaagcacattgaaacgtttttctctgaagagcgtattaggaaagtcagtcacctacaagagagcaacacaaaaggttgtggcaaacgagaagaatccctaattcttgaagggatccctaattggtgaagaccaattagcaaatttattaattagaccaatccctaattggtgaagaccaattagcaaatttattaactaaaggtcagtttacccttctggaaacatcctggaggcagagaccaaatcctgtgttcaaccctggtgccattgcccaccccagtgccttctggttgaccgatagagctaatggcttgtttcctggaaccacagccgtgatctttccttagcatctggcctcaaaggttaagcaagactatttgaatagtgtacaccatggacatgcagataaacaggctccccgttttcacccacccataccccaagcttccacaaagatgcccccacgggggtggaagtatctacaaagccctggcacatgcctttgagcggatgcttcctccctgccctttggccctaagctgacgcataagtcatacattccaaagccacgtggaaatgcgttttatgcttgctggagttctggattctttgttccaagtgcgtgaataaattggagggagctatatgtatttatgggagacgtggccctcgataggaaggatgtattagagaaatgctgggctagatcaaagagcgtctcattcagcctgcagagactccagttagatttttcaaccccacacccttaaacataaacagtccataggacataagttattttgtgttttgtttcttacttcaaaacttgagggactccaaagctgattatgaaagagtcctaagaatgctgagcatttcccgtgtggtgtgctgggccagggacatcaaaggttccgtttgcaacagtgctagtacagggcgacagaagccttcatcttcttcctccccacgcttctccccacataattgctttcattattcacaccagccaaacaaagggaaattgcatgaccacagtgtgtgtgagccacacacagcacttgccttggaaaggctgtgcacacgctaactttgtgggatccttggcccttggctcaaccaggatgagggtggggtgtgtgtgggggtggtgggatggccgtggttaatgcaacccaacatgtattcaggatgtttccatcaagcatgacctcatgtcttccagcccgctagctatcattatactggtggtcacttttgacttaatggttacaaaaataattcctttaataaccaaggtggaaattcatagattgcacgtagttgtttcttacctcccccaggaggcaagaggttggaactattactgacactgtctccataacatcagaacaactcatgaattcaaggaaaaacaaagcaaagcaaaacaaaataaagccataaaatccatgccagatcggttcttggatgttgagcagatcaaatagctgcagaagtttccttctttctctcttctttaatagttgtatttcttcatcctaaacagacagtcacattatgatcaccaggaagagaaattcacttactcaacaaagatttgctaagccccactatgtcttaggtgcatgagactgatgaagtctcatggtgttgagacacaaaacaagcaaatcaataaatgaaaaaataatttacagtggggaaggtctcatgaagaaaataaaatgaggtgattcagtagagtgaggcaactttttacatctgaagtccagtaaaataaaaagcatattttgaaagatactagctagttgagggaaatagctggttaccaaaaaagtcattcctttgttggggttattggaaactcagagaggggttctcccagagactagctcttagctgaaaagaagtctcgagttatcaccatggatgaaccagctgcctcccctcctctcacagggggaagtccagccaagcagacgacctgggaaggagggcaccgggtcccagcactggcttactggcctggcagagttccagttaatgtcaccagcactgccttgttaaggtatgagaccaaaactaccttgagatgttggggcccagagcaagaaaagtcatggaggcatgggtggctagatggaggcatgggtggctagatggaggcatgggtggctagaggcctcaggaaggtcattcaccacttgcctttgccgggtgttcccagacacttccaagactctgactgtagaagtgatgaaagtaatagtgaagtggggccacgtgtggaggctcgcttctgtaatcctagcactttgggaggctgaggcaggaggattgctgaggtcaggagtttgagactatcctggtcaacatagcaagaccctatctctaaaaagaagggaagggaagagaagggaggggaggggagggaagggaaggagaggggaggcgaggggaggggaggggagaggaggggaggggagggagaaacagtgaagtgggactcgagccatcttctgggaataacacctgagtgaagaagggattggttggtttcacatacatcagcattgggtcctggctgtgtctgctggagagagtgcagaaaaggcggcagcagcagcatctccctctcagcctgtgccaagctgaccgaggcaatagatcctttgagacctaattgttccatccttggggttaaggcaggtgtcttaggggtggctgtgagaagccggctagtctctagcaatccgatggccccaagaaaggagtccagatgtccactttccctggaggagggtggagaagaaaggtggcccctccaggccattagggaaataatgaatccttaggtgaagacattcctcctgcctctggccatgatgcttcttaatgagctgagtgtctgcatagctcactgcagacccatcacatcaggtaaatgtgatgtctcaccattattcttattgccgccttaaggcagatccaggaggccatctccatggcaaagaacttggctgtgcagcgtctatgtgaaaacaacatcttcccagctatggaaccatgacttatcctggggacttttcactaattcagacaggaccttcctctctgtgttctgccctgtgttcactaacaaggggaaccctccgtagaaccctgtgctcattcatgtgctcagaaaactgctggttaaagaccgatttcctaattccaaaggttctttgccattagcctaatgagttctggcgtaaagaacacagctgagtagaggcaggcaagcttcattggcaccctctgacttccctagatccaatggggaggaggggagagactcaaagtccaggggaaaagggtaaacagctttcagggccaaagtatggggtgggtgggcatcacccctggcagcctgtggggcccccagaaattccgggtcagccctgtacagtcaggagggggcagcgtgctgtcagcgggtaccagcaggtgtgacaacaacagcagagcctggaatctgtgatgtcaggctgcctgggaaaagggccaggcaggctgcttttatagggctgacttggtgtagtcaaagtgcttatcaagaggggccaagtgttcacgggccaggctgcacatggacaagtaactcagccgtctctcaagttgcttcacagaaagccaaccagtggcttctcatcagagaatggtgtttgcacctacagtcaaccataataaaactgcctcatctcattcataatgtagggccttagaggagacaactgactgagaggatggtttggtgacccaaggcagtgtctgcctgagggccccagaattgtaccaggataataccaacacaccgtatcggtacctcctaggagatacattaggttggtgcaaaagttgttgcggtttttgccattacttttagtagcaaaaactgcaatgactttcgcaccaacctaatatatagtgtatcacacacacacacacacacacacacacacacacacacacataccttttattttatttattttgttaagagacagggcatcactctgttgcccagactgtagtgcagtgccaagatcatagctcactgcagccttgaactcctgggtttgtgtaatcctcccatctcagcctcccaagtagctgggactacaggcatgcaccactatgcctggctaattttttaattttttgtaggcatggggactcttaatgttgcccaggctggtgttgaactcctggtcccaagcactcttccctcctgggcctcccaaagcactgggattacaggcatgagccatcacacacagccaaggctagtttttggtgttaaattaggctggatttcagccagccagttttacctctatagatttaccttcttgctgtttcccatatgaatccatgttaagcaaatttgggcggagtttcctactgcctggacaggctgtgtgtgtgtgtttctctttcccttgacacctcagggtcagcttgacagagaatggtactatgatccaaattcaagacattgatgctaatgcttcatgttgttgggagcccagcccggcaccctccgcccagactgcatatcacctactcttgtttcattgcttgaggaatatagatcttccagatcagagataactcccttaagccactaagagctaaagccagagtcccttaaacctatatccttgaggccctgaggaattatgagcatcagagagtggtcaagttgatataaatatgaatacagaaaagtgaaagagaatgtgtgggagagggggcgggggatccattcacatggatcccattggttttagagataaccagtgttaatatcggtgtgtacctgggtgatgtcataagatgaaagaagggtcttgcacgtgacctgcctccacagacacaagtacaggatggggaaaatgcatttattccacagatatttattgccatgtccaactatgggtcaatcattactccagggactggggagatggcagtcatgagcagaccaaacagaaagctctttgtttaggggctaccttaccttcaggaggccagggctttggcagcacatgggaaaaggtttcagtagttttaacttaaaactgtgctgcaggctttcccaaccgtggcgtggtcggcattttgggctggatcactcttcgttttggaggactgtcctgtgcgctttataggatgtttagcagcagctctggcttctacccattagatgccaatcgtgtccccaccccaccccctaagttgtacaattaaaacgtttccagacagtgccaaatgtccccggggagaatgaactcactctggctgagaactacggctttagcggaagctctcttagccatatacaagaaggggaagggcctgctctgcctctgagctgggagacccctacctctgctccgaatgaggatcgatccttcagagatgaactggggcaattatgaggtgaccagaatggcaaaaaggacttgaaacaatcttatttgaaaaacagctaaggccggacgcagtggctcacgcctgtaatcccagcactttgggaggccgaggcgggcggatcatgaggtcaggagttcgagaccagcctgaccaacatggtgaaaccccgtctctactaaaaatacaaaaattagccgggcgtggtggcgcgtgcctgtaatcccagctattcaggagcctgaggcaggagaattgcttgaacccaagaggcggaggttgctgtgagccgagatcgcaccactgcattccagcctgggcgacagtgagactctgtctcaaaaaaaaaaaaaaaaaaaaaaagaaaaacagctaaagctgctgtgtagccagaagaggtaactccctgggctacctcgtggctctgaaagacagtcaggtgtgtggaagagggattcagctggttctggcctgtccgaaggcaccggtcttggaagtaaaagctacgaggaggctgtgctcacatcagtgtcttgtggtttagctgtcacctacaggcagggcctaaccacatgtcgcctttccaagtcctctcctcctccctggatctggcagtgggtagtggtggttggtggaggtggtctcacccccacccccactcttggcagctctctttactctgtaagaagcgcttggtttgctggggggcatcccctgatgctctgggacccctgcaaccccggttctccctgaaatcaatgtggctggggctatgctggcttctaagagggactcgtgtgtggatgagggtgccagggaagctgcccatcaaatgtgagcataggcttgcccctcatgtctccacggctgagaccaggaaggcgtgggcacctcacttttctcggggataatgacagggaagaacaatgcaggaaaaaagttaaaactaaatgcagaaagaaatttacaactcagtgctaagaaagtactgctcccacggcctagggatgatccctactgttccctgtcccttcctcttcttcagaggaagttctcttcttgccttcattcgggagagatgaacacaaagcctctgtctctgtccaggtccaagcgcctccaatccatccccaagcaaacctctcctgcctctcgcttcctgtccttagatcagatccaccttttttccagataaaacgttctcagcttctctgtcccctgccttcatcctgggatgccttccaccccagggctgcccagcacagcacctcagttcccatactatgcatcctgaagtccatgtggttccttctggaacgagccccctgttggccttccactcccctttacctaccccccacctgcacaccttggggtccagcaggccaggcctttctttctttctttctttctttctttttttagatggagtttcactcttgtcacccaggctggagtgcaatgatgtgatctcggctcactgcaacctctgcttcccgggttcaagtgattctcctgcctcagtctccccagtagctgggactacaggcatgcgccaccatgcccggctaatttttgtctttttagtagagacagggttttatcatgttggccaggctggtctcgaactcctgacctcagatgatctgcctggcaggtcaggcctttctgcatcctcctcgccaccactgccccatctccactcctaggatccttcagcagccccttggataagaacacaaatatgcacccttcctacgaacaaccttcagagcctggggtgaccagagccacaggaaagaaaaagcacatattttcataagggcaatgcaacctgcaaagatgtcaccctgcccactctgaggacagccttttgtgccattgtgcagagcaatctcagccttctcctgttatcacgagtgggttcatggctgcccttgtcacaaccaaaaagcccactgaagtggggtttcatcccatcagaggctgggaaccacttctccatcagacccatgaggcatagtgccagagtccatggaattttggaattttttttttaagatggaatttccctcttgtcactcaggctggagtgcaatggcacgatctcagatcactgcaacctccacctcctgggttcaagtgattctcctgcctcagcctcccgggtagctgggattacaggtgcctgccaccatgcctggctaatttgttttgtatttttagtagagacagggattcaccatgttggccgggctggtctggaactcctgacctcaggtgattcaccctcctcagcctcccaaagtgctgagattacaactgtgagccactgtgcccggtccttttttttttttttaatgaaggaagagacccacgaaggcagaagtgcccaggtcccatgaaagctgcagtgtggctctgccaaaagccgggcaccgaaacgaacaggggaagctttgaagtataggtttgtatttattttgtctctttctccgaggttttaaagactcccaggcccaatttctttggtggggtttgaggtttggagtagctggggtgcccttggtagccttagtagggtggatgctttcttcaagttctcatgtaggctgggggcccaggcctgggatgactttgggctgcatgtgccagggaccgtctccctcttccagggctaagctcttgggcttggctttttctgttacttaaggaaggactatttgacagcccaagcttgccaaatcgggatggggctgcctcgagtggcctgagtcactggacatgttgaagcttttctcatgggcgagaggctttctttgtgctccaggtggactaggtacctctgaagttcttgccaaagtctgagacattaggattccgtgaacattagacttagtgctctataattgggatgctaaacctcaggagagagtagtggggggaaatcagatggaaaaagaaagtacacaatactttccaaaatcgaacgcagatcctgtttctcttgctgactgatttgacccatctgtgacgctgatctctcttaggggcacaatttagagaaaactcgagcaaacagctccaaaccaccgcggccttttcagactgctttgtggtcctctttgctttccggtatgtggcaggaaccttggactctggacaggtttctggactgttccgtgctctgcgagtgctgactctgcattcttgactttgcatcagagtggggtgccaggtcctggagcttgtttcttaagagataagccaccagctccatggactgtgggagccaaaggcaaacagaaacattctgcactgtagtcaatggagagattctgcctggggttgtaggtagagccctggagaggagaaggagatggccaacaggagacggagcctcagagcaggtcctttctgcagcccccttagagggcggatatccccccagcccctcagatatcagattggggaaagtggggatttgtggccctggaggcttcctgatgaatggtgcatgcgaaagcctgaactctgctgctgcgcccagcctcagggctaccagggcctctttcttgggaaagtccagcttcgcattagctcagccctcctggctccagtaagccccgctgacttccagttggcctggccatcatataaacggctctgttgaaggggcagcctctctgttcttgcggaagacttttttcccccaacatgagcacaacaggctggaggaagatgtgccataggtagagtaaccttgcaccatatgacttaaaaaaaagtcacatgaacaaaatccactaaaatatgaacaatggctgcctttgggtgatggactaagtgtgtgttgttctctcttttatatttccggatgctctcattttttcaaccataaacattcgctatttttatttatttatttatttttggagacagagtcttgctctttcacccaggctggagtgcagtggtgcaatctcggctcactgcaacctccacctcccaggttcaagccattcacctgcctcagcctcccaagtagctgggattacaggcgtgtgccaccacacccagctaatttttatatttttagtagagacagggtttcgccatgttggccaggctggtctcaaacttctgacctcaggtgatccacccacctcagccttccaaagtgttgggattacaggcgtgaggcaccgcacctggccgcattcactactttgtaatggactaaaagagctaaaataaagccggtggaatgttccacatatcatggcattttgaacaaaaactagatcttttataacacagagacccgcctaatggaaaaggcagtgaatattctcttgtggacacctgtcccacactgtttcctctaagccaatggctgtcaccaagctggtgacaggtagaacgcctcagttcttaggtgggctcacagggattacccttgtgaatcattaagacacaaacatccagtgaggactttctgagtgccaggtcttcttctctgtgccttacatgtgtgtttcatgcacacaaccacctgtgagctggcaccaatacagcagtcctcctttatccacggtttcactttctgcagttttagttacctgtgatcaaccatggtctataaatattaaatgaaaaattacagaaatgaatctaagttttaaattgtgcacattctgaggagtgtggtgaagtctggcaccatcccacccaccctgtaacgccctggacgagtccgccctttgtccggtggatccacgctgtatacgctacctgcctggtagtcacttagtagccatctcagttatcagattgattgtcgagatatagcagtgcttgtgttccagtcacacttatttttacttactaatggccccaacgtgcaagagcagtgatgtgggtaattcgaatatgccaaagagaagccgaaatgtgcttcctttaagtgaaaggtgaagttcttgacttaataaggaaagaaggctgagtgcagtggctcctgcctgtaatctcagcactttgggaggccgaggcaggtggatcacttgaggtcaggagtttgagaccaacctggccaacacggcgaaaccccatctctactaaaaatacaaaaattagctgggtgtgttggcatgcacctgtagacccaactacttaggaggctgatgcaggagaatcgcttgaaccctggaggcagaggctgcagtgagccaaggttgcaacactgcacctccagcctgggcaacagaacaagactccatctcaaaaaaaaaaaaaagggaaagaaaaagaaattatatgctgaggttgttaagatctatggtgagaatgaatcttctatttttttgttttttctttttgttttttttggtagagatgggattttgccctattgcccaggctggtctcaaaccggccattgttcacatggccattgttcagcctttattcacattttggtggattttgttcatgtcagaacaaaatcaactgatccacccaccttgacctcccaaagtgctgagattacaggcataagccaccaagaatgaatttcctatccatgaaattgtaaagaaggaaaaagaaatttgtgctaattttgctgttgcacctcaaactgcaaaagttatggccacagttcatggtaagtacttagttaagatggaaaagtcattacatttgtgagtggaagacatgaacagaaacgtgttctgatcgggcgcagtggctcatgtctgcaatcccaacactttgggaggctgaggcaggagaatcacctgaagccaggagtttgaaaccagcctaggcaacatcgcaagaccttgtctctacaaaaaaataaataaataaataaataaaaatcaataaaacaacaaagaaatcttgtaggtgtggtggtacatgcttgtagtcccagctactcttggagtcagacgagtattacttcagcccaggagttcaaggttacagtgagttatgatcacacactgcactccagcctggatgacagagcaagactctgtctctaaaaaaattaagaataaacatgtttgatttatggcaatcaggtttggtacaatccaaggttccaggcattcactgaggcccttagaatgtgtctctctctgataaggggggactactatattattaaaatatcatacccatcttagagaattgaaaactgaggcattgagaagctagatatgtggcagagctgggatttgagcccaggcaacagctggctgcagagcctgggtgctgaaccgctgcaccattctgcctcttgtaggagcagaaatccaggtggaactgaaaggaaaaacaagcaggtagagaagttaagccagcccataggagaggctgtgggtgcttgctctgggctggttcaggtgggggttgacacggcagggtcagggagcgagtcagaagagctggggacaactcagtcttgttatttccgcagcgtgctggacatttttccaactgtggtagccctggcccaggccagcttacctcaaggacggcgctttgatggtgtggacgtctccgaggtgctctttggccggtcacagcctgggcacagggtaagtggaggaggtacttgcccacatgtaggctctttaggaggctggtctgctgcctctcacctctgtgcagacagaaccatcatcagaagatggtcaagaacaggctgcaggtcggatacagtggctcacgcctgtaatcccagcactttaggagaccaaggcgggctgatcacttgaggtcaggagttcgagaccagcctgaccaagatggtgaaacctcacctatactaaagatacaaaaattagctgagcatggtggcatgggcctgtagtcccagctacttgggaggctgaggcagcagaatcgcttgaacccgggaggcagaggttgccgccagcaagtggctggttcagaccccaaaaggtgaagcatttgagatgagcctctttctacccccaacccccagtccagatttatatttaacagtttggcttagggtgggtgtatataggttctcattccctataatgggcaatttcttttcctgcatgtatttaatttaataacatagctacccagtatttttgttagatgagatgactgactagtgtctgcaacttgtttattgtgagcctcaccctctagaatggaagcttcttgagggcaagaatctgagctgttgagttgagctccgagttctcactgcctgcagtcagccagcatttcagtccatgcaaactggatgaaccaatgaaggaacaaatgaacaaatgagtgaaagaccctttggacagcaggtccagcaagggccttacatccaacattctcccagctccagagggctcagcacactcttggcagcctgttttttttttttgtttttttttttgagatggagtcttgctctgtcacccaggctggagtgcagtggtgtgatctcagctcactgcaacctccgcctcctgggttcaagcgattctgctgcctcaccctcccgagtacctgggactacaccctcccgagcccatgccaccatgctcagctaatttttgtatctttagtataggtgaggtttcaccatcttgaccaggctggtcttgaactcctgacctcaagtgatcagcccgccttggtctcccaaagtgctgggattacaggtgtgagccactgtatccgacctgcagcctgttcttgaccaagcagaccttggcaatggctctgggcttccacttcccagcatcacctcctcaatgtcccctgtttgcactctgaagcactcattggcagtgacagccaggaaatgtcaggcctcatggcctttccttgtcttttccctgtgttttcctttcaccaaaaggaagaggaagcaggaggaggcaaggaggcggaaggagcacagagtcccctctgcaacgccctacaaatgcatggcttcttggtgagggacccacacatcaaagggtctatttgtgtctttgctaagggtcacatggaagtgactcaaatgtacagaagtgtcctgtggctggtagttaccaaagctgcccttcccacccagcctcccccagcaaaccagaacatgggtcttctatgggccatcggttcttctgtgcacattaatgcagtttttaggggttgttggatgaagcctgagaggtgttctgaagtcctgcttctccccagaatatctgccccctagagctgcagacccttccaggcctagcccttctccctaagcaggagcagccaggcaggaagatggtttccgccttgaggttggaagttagcagtatgtgaccctggagggttgtcacagacgtcattggagaggtgctccggagtgtttattaccatggctgctaggaataattggggtcatcaggaagtgcttcaaggactgtgctctccttgacgttgtcggtactgcctgtgggagccagctccttcatgtactaacttcctttctcagacgggagagctctgctcttgctctaactggagttttgcgcaggctcgtagagaccccatcctaactagtgcccagcagggttaggcccaggaaccagattggaaaaccagatacaagtcacagcatcgtcacggggaggtatgatggcgtggttaatgcagctggagtcaggactgatttgctccctaaccacaccccatggcccagaaagaaacagccatgcttactgcttgtgggaagcagctgatggtatcttcaaggttaagagcacacggggctggcacctgtgggtcacactcagtctcccagagcatgcctgcagtgtcagtgaagacacttgagataagattctgaagtttgaggacaacatgggtagttgctggacctgaatttgggtttggtcttctctagtcagtcctctctatcaaagcaaagtcatagacctaaggaaataagagtaaattgtctcaaatttggaatagctatgggggaggcttgaaggtaagaatatgaggaattatatatatatacacacacacacaatattctatacatacttacatgtatgcatatgtgtgcatacgtctatacatgtgtgttatacgtgtgcatgcatattctagacgtgtatgcatatgcatgttttgttttaatttaatttaattttattttattttttgagaggagtctcactctgtcgcccaggctggagtgcagcggcacaatcttggctcactgcaacctccacctcctgggttcaagcgattctcctgcctcagcctcccaagtagctggtattacaggcgttcaccaccacgcctagataatttttgtatttttagtagagacagggtttcactgtgttggccaggctggtgtcaaactcctgacctcaggagatctgcctgcctcggtctcccaaagtgctgggattacaggcgtgagccactgtgcctgggctgcatatgcatgtttatgtaccatgtatgtatattcatgtatgcatatccacatctgtatacatacatgcatacatatgtatgcatatgcatgcttataccacacatgcatacacatgttcgcatatgcatgtgtctatataaacatacatatgcatgcttatgtttatacactatacatgtgtacatatgtatgcctatgcatgtctatgcacatatatgtatacacatgcatgcacacacatacatgtatacatatgcatatgtccaggcacataaatagagatatacacacatatttatatgcaggtgtatgcacatgtatacatacgtgtatatatatgcatatatcaatatacacatacatatgtgtacacagatgcatatgtctgtaacatatgcatacatgtgtacatatgtattttaaaataagcacaatttgtgttcaccctcagatacatcctgggcttacaaggattccaatatgagttggtttagaaacactttcagttctagaagctcaaagtaactcctggatattcaactgggaacaatatgccaatgcttctcagcaatccagtccttccctattgcaaaccaagtaaccaagagttaaggagaggagcaagagagttgagaggtgtcatgtgcacaatgagctccagttccacactggatggtcttctcacaacccactccagcaacctctagggacgttgtctctgtgatgttcgaaaccacatcagctgacaccatgctgcatattcttgcatcagctcaacctcctgcttctgatcttgatgggtctgtgtctaggcagtgaggggcaccaggagagagatgagggctgggaaggggagggctgcacagcctagaaccaaaggtcccactttgtgctttcctggctcccagatggaagctgaaggtggtaacatcatcactggtcaggtcgtgtcttagccccaggttgtcatgatcaggtccagaaattgtcaacgaaggaacgtttcccctaacagctctgcatctgcccagcctcacacagtctggggctgctgtgggtcatcaaatgcttgacacgcccctggaggccatacatcgaggaaacaagctgagttttaatgtccagaaagaacgctgatcacttctcttagggaggcccctagtggcgagagatgtcatctggcgtggctggcaaactgaccacccccatccaccccctttggaggctgtagctgtgcatccccacctgaatggagaagaagcccaccttcaggggatgctatatcagcaccctgtgggacttaaggtaaaggaatgctctcgtgcttaaaaaacaaaacaagataaaatagagcaagaaaggccaccaggaaggcaaaacaagtttgcagaagataaagtcatctttgaaatttgaaccaggcatctggagagctgtgattcatgtgtacttttgacagcttccttcctatattgatataaacaagaaagccataatgggtcttctcaaacaaacaaaaaaaatgcatagacaagttctccaaagtccatctatgtttctgagaatgagccatcccacagttttgcttcctcgtggattttggaagttgcctctggtaacgccacataaatagtgggaatatagcagcccaccctcatggaatttctgtgactgagacgcaagtactgtgactgatctgaagcagcaacttcactcccatcttctgcatgtccgcgtgcatcgtatatcagttgacaatagattttccaagtctcccacttcctgctgtctcaagaaggaaacaaaacagtctcctgtggtgaagaggcttggctttctgcagggatggaagaagtgagggttttcagttacgacttcttttcctgtttggaaggaacctgctatcatcatgcgcgccctgggtttgtgcagggattgtcacgagaacctggaagccgcaggtgtggggaggagccccaccttggcggcatcctctcagagctgtgaaactccgggggacagctgtttactgctccaacagatgtttctcatttttttcttaagtctcgtgtggaaactttgaatcatgtaagtgcctttccagccctatatacggttgtgattcataccaaggcagtctcatgcttttagcccagacccaccaacctaccaaggacactggccttttgttttctttcacatccttccctcgagaaccctgatttaggtgtttccattctgtacggtaattcttttatttgtgacctgatgaggaaagatttcctcagtccaaatatagtcggattgagtcatagctgtgggcgtctgtgaccagagtctgggctgtgcccgattctgcggaaatcaaggatgccttcttttgtaccatccttgctcaagggagagttggaacattgacttgatgctgaagaagcctttcttcaaagacagctgagggtcacctgcatcagaacccttggaaatacttgtaaaacaagtaagtccccagggcccatcctgaccctgaggggttggaactcaggcagggtggccttgtgggcctgtgaccggtgccccccacacacagagccctgcacttggagggaccctgtgcttggtttaaagctctgccgtggtcatcatgaaattttaagtttgtgaacaaggtatccctgatttgcattttgttgtggactttgcaaattacatagcaggtttcaggcctagaaatctgacctacctagtgagaccttttgcctactcttccagagttgtaacccactcccatcaattaaccagcaaaataacaacttcacaggctccctggagttgactggtgtggactccaggcttgtatctgtcagtgtgtgtttgggcacagggatagggagaccagaccctgaaaaagacagtaatatgttccagggagcatctagcatcatctagcatgttttattttcttttgctgtttcgagacaggatcttgctctatcacccaggctggagtgcagtggtatgatcatagctcactgcagcgttgacctcccaggctcaaacaatcctctcacctcagcttccaagtagctaggaccacaggtgtgcaccaccatgcctggttaacttttgtatttttttgtagggaggggtcttgctgtgttgcccaggctggtttcaaactcctgggctcaagtgatcctcctgcctcgacctcccaaggtattgggattacaggcatgagtcaccgagttctgccaatttttctattagtaagctctgccaccctttctcaggtgctgttccaccccaacagcggggcagctggagagtttggagccctgcagactgtccgcctggagcgttacaaggccttctacattaccggtgagtgaggggccacttagccctgcctcccacagtcacagctgcacggggaccccatggactctcacccaggcctctgggaatgagtgtgagtccctcctttgtggggggttctcagcacctcttgacaagcgtctcctccaaacccagggtccctgcacaggctctctggatccctcatatgcaaataagatctttgtgctgttcacctgaatttctagtgagctgggagctctcagcacgtttattcagctccttttcacatagagagcatttcctattgtcgtgctttaaatgccagtttggatgaacattaaatggaagcctagagatattttaaagtataatttacttgacaatagaccgtttcagaaaatagattttagaggactagttagcaaaccgacagaagtctctctgcttcttggttcactgtgactatctgtctcttagatgtatactttagaaatgtcatactgtatcaggatggtcctcagggtcttccaatggcttcttgctgccaattgaattcagactctcaatcccgagtcctactgtctttccacccttagttttccaagaacaagtctcctcttccttggtctccatattaaaatccttttaagcctttatggcccaagtcaaatgccactttcataaaactctcttatcttcccagctgggtaggaattctggagaactctgttatctctcactttctgccatgcatgcccgtcatttaggtacacgtcttatttcctgtactagttttttttgttgtttgttgttgttgttgtttgtttgtttgttttgagacagagtctcgctctgtcgcccaggatggagtgcagtggcgtcatcttggctcactgcaacctccgcctcttgggttcaagcgattctcctgcctcagccttctgagtagctgggactacaggtgtgcaccaccattcccggctaattttttaatttttagtagagactgtatttcgtcatattggtcaggctggtcttgaactcctgacctcgtgatccgcccgcctttcagcctcccaatcctgtactagttttttgtttttgtttttgttttttgagatggagtctcgctctgtcacccaggctggagtgcagtggcgtgatcttggctcactgcaagctctgcctccctggttcacgccattctcctgcctcagcctcccgagtagctgggactacaggtgcccgccacctcgcccgccttatttttttgtatttttagtagagacagggtttcaccgtgttagccaggatggtcttgatctcctgacctcgtgatccacccgcctcggcctcccaaagtgctgggattacaggcatgagccaccttgcccagcctgatcctgtactagttttaagctttctaaatttggaactctttcagcactttaatctttgttgtcttgaagtgcttagcacacttagtaggaacgctacaatttttaagtaaatgaaaaacaaaaaataaaaaaaggaaaacctgtgacctaatgcagattccaacttgattcagttatttaatgttggagcttttcaaattatatgataaaaaaattattttccctgagtgtaaataagtgatcctgaagaaaatgtggcataaaaacaaaacatgacttgaggggtattaaaaatgtcacaaaaatctttgattctctaaaacctaaaactcagtcagatatttgttgttttcggttgaaaagtttctagattagagtccttatattacattatctaagaggtatgggacctccaggctgagttaatttcacaagtaaaagtcctgccagaaagcccttggcaccacaatgttggaatcagacatgttactatgaagtaatagggctatttaaatgatcacaatcagataggaactataacacccaggggaggtctgctcttctaaggagtcaccaaactcccaagagagtctgggtagggagcactgaacttttaatccatcagtgaaaactgggaataggatgaaacaggggcatgttctgattccctcttcctcttgcttctaatatttgcattccagttacttacaactgcttttggataagctagatgaattgacatctactacattagattagagaaagatgtgttcgtctatgatgaggatatgatgttatggtcacgcactgggagtggtcttgaaaagacaaccagtctgttttggtatgtggcctagaattaaggtgtaccttattgtttttctttttttttattattatactttaagttctagggtacatgtgcacaacgtgcaggtttgttacctatgtatacatgtgccatgttggtgtgctgcacccattaactcgtcatttacattggttatatctcctaatgctttccctcccccctcaccccaccccacgacaggccccggtgtgtgatgttccccttcctgtgtccatgtgttctcattgttcaattcccacctatgagtgagaacatgtggtgtttgtttttttgttcttgtgatagtttgctgagaatgatggtttccaggttcatccatgtccctaccaaggacgtgaactcatccttttttatggctgcatagtattccatggtgtatatgtgccacattttcttaatccagtctatcattgatggacatttgggttgggtccaagtctttgctattgtgaatagtgccgcaataaacatacgtgtgcatgtgtctttatagcagcatgatttataatcctttgggtgtatacccagtaatgggatggctgggtcaaatggtatttctagttcgagatccttgaggaatcgccacactgtcttcctcaatggttgaactagtttacagtcccaccaacagtgtaaaagtgttcctatttgtccagttaaggcaacctgtacacaaagtgaaaggcccagatctataatgtataatttggtgaggttttataaatgtagataccgtgtatgtacccttttaatggtgtgaattccattgattctttttctttttccattgattgattttcaagtgttaagccaactttacattcctcaataaatcccatttagtaatgatgtatcatactttttatatcttgctgattttgatttgctaagattttgtctataattttcctttcttgtctatgtcaaggtttggtatcaggattttgctggccttataaaatgagttgagaaatattcccttctctattttctgaaagggtttgtggaagatcagtattatttctttcatgtttgattgaattcatctgtgaaatgatttgccaaattcattgttgtgaagattttgtcatatttttaaaaagagtgttagtattttaggtcttatatttagatctctgatccatttccagttaatttttgtatgtggcataagtaagggtccaacttcattgttttacatgttgacatccagttttcccagcatcatttattgaaaacactgtcctttccccattgaatggtcttggcacccttgttaaaaatcatttgatcatacatgtgagggataatttccactgtctattctatttcattagttatatgtctatgtttatgccagtaccacactgttttaattactgtagacttgttgcagttttgaaatcaggagtgtgagtcctacagctttgggctttttttttttttttttttttagactgttttgactatttctgggtcctctgagattccatgtgaattttaggatggctttttctatttctgcaaaaaacatcatcaggattttgataaggattgtactgaacctgtagaccacttggggtagtattgacattttaacaatattaagtcttccaatccatgaacatgggatgtaaccatttgtttatgtcttctttaatgtctttcagctatattttatggttttcattatgcaagtctttcacttttttgtgttaattcctattttactctttttgatgccattgtaaatgaagttgttttcacaatttcgttttcagattgttcactgttagtgtatagaaatataactggctttgtgttctgaatttcaatcctgccattttgctgaattcctttattagttctgtttttatgtggaatatttaggttttctacatataagattatatcatatctgaaggaggtcattttacttcctccattccaatttggatgctttttatttctttttcttgccgaattgctctggctggaatgtccagtactatgtggaacagaaatggcaaaaatggcattgaaacttttattaatatattatgtccttctctttgtctcttataaccctttttaaaatttaaagtctattttgtatgatattagtacaaccactcttgctatcttttggttactatttgcatggaaaatcttttcctaccatttcactttatttattttttatttttccatgggttattgggatacacgtggtgtttggttacatgagtaagttctttagcggtgatttgtgaaattttggtgcacccatcacccaagcagtatacactgcaccctatttgtagtctttcatcccttgccccctcccactttacccccaagtccccaaagtccactgtgtcattcttatgcttttatgtcctcctcataacttagctcccacatatcagtgagaacatacgatgtttggtttttcatttctgagttacttcacttagaataatagcctccagtctcacccaggttgctgcaaatgctgttgattcattcctttttatggctgagcagtattccattatatatatatcacagtttctttatccactcattgattgatggacatttgggctggttccacatttttgcaattgcaaattgtgctgctataaatatgtgtgtgcaagtatctttttcgtacaatgacttcttgtcctctgggtagatacccagtagtgggattgctggatcaaatggtagttcagcttttagttctttaaggaatctgttttccatagcggctatactagtttacattcccatcagcagtgtagaagtgttccctgttcaccgtatccatgccaacatctactgttttttgattttttgattatggctattcttgcaggaatgaggtggtatcatattgtggttttgatttgcatttctctgatcattagtgacattaagcattttttcatgtttgttggccatttgtatacttttgaggcttgtctattcatgtgcttagctcactttttgatggtattgtttctttcttgctgatttgtttgagttccttgtaggttctggatattagtcctttgtcagatgtatagattgtgaagattttctcccactgtgtgggctgtttactctgctgactgttccttttgctgtgcaaaagatctttagtttaattatgtcctagctatttatatttgttcttattgcatttgcttttgggttcttgttcatgaaatccttgcctaagccaatgtctagaagggcttttccaatgttatcttctagaatttttatagtttcaggtcttagatttaagttcttaatccatgttgagttgatttttgtataaggtgagagatgaggatccagtttcattctcctacatgtggctagccaattatcccagcaccgtttgttgaaaagggtgtcctttccccactttatgtttgtgttggctttgtcgaagatcagctggctgtaattatttgggtttatttctgggttctctattctgttccattggtctatgtgcctatttttataccagtactatgctgttttggtgattatggctttatagtatagtttgaaatcaggtagtgtgatgcctccagatttgttctttttgcttagtcttgctttggctatgcaagctcttttttgtttttgtatgaatttttctaattctgtgaagaatgatggtggtattttgatggggattgtgttggatttgtagattgtttttagcagtatggtcattttcacaatattgattctacccatccatgagcatgagatgtgtttccatttgtttgtgtcatctatgatttctttcagcagtgttttgtagttttccttgcagaggtctttcacctccttggttaggtatattcctaagtttttttttttttcagctattgtaaaaggggttgacttcttgatttgactctccgcttggttgctgttggtgtatagaagagctactgatttgtgtacattaatcttgtttctagaaacttagctgaattctgttatcagttctaggagctttctggaggagtctttagggttttcgaggtaaacaatcatattgtcagcaaacagtgagagtttgacttcctctttactgatttgaatgcccttttactgatttgaatgccctttacttctttctcttgtcttgctctggctaggacttccagtagtatgttgaagaggagtggtgacagtgggcatccttttcttgtttcagttctcagagggagtgatatcagcttttccccattcagtattatgttggctgtgggtttcttttttttttttttattggtgcaaattactgtttattaagcattatttattccttatgcaaaacaaatgtgcactagcctttggcattaactaaacactctctacatatttctttttttattattattatactttaagttttagggtacatgcgcacaatgtgcaggttagttacatatgtatacatgtgccatgctggtgtgctgcacccattaactcgtcatctagcattaggcatatctcccaatgctatccctcccccctccccccaccccacaacagtccccagagtgtgatgttccccttcctgtgtccatgtgttctcattgttcaattcccacctatgagtgagaagatgtggtgtttggttttttgttcttgcaatagtttactgagaatgatgatttccaatttcatccatgtccctacaaaggacatgaactcatcattttttatggctgcatagtattccatggtgtatatgggccacattttcttaatccagtctatcattgttggacatttgggttggttccaagtctttgctattgtgaataatgctgcaataaacatacgtgtgcatgtgtctttaaagcagcatgatttatagtcctttgggtatatacgcagtaatgggatggctgggtgaaatggtatttctagttctagatccctgaggaatcgccacactgacttccacaatggttgaactagtttacagtcccaccaacagtgtaaaagtgttcctatttctccacatcctctccagcacttgttgtttcctgactttttaatgattgccattctaactggtgtgagatggtatctcactgtggttttgatttgcatttctctgatggccagtgatggtgagcattttttcatgtgttttttggctgcataaatgtcttcttttgagaagtgtctgttcatgtccttcgcccactttttgatggggttgtttttttcttgtaaatttgtttgagttcattgtagattctggatattagccctttgtcagatgagtaggttgtgaaaattttctcccattttgtaggttgcctgttcactctgatggtagtttcttttgctgtgcagaagctctttagtttaattagatcccatttgtcaattttggcttttgttgccattgcttttggtgttttagacatgaagtccttgcccatgcctatgtcctgaatggtaatgcctaggttttcttctagggtttttatggttttaggtctaacgtttaagtctttaatccatcttgaattgatttttgtataaggtgtaaggaagggatccagtttcagctttctacatatggctagccagttttctcagcaccatttattaaatagggaatcctttccccattgcttgtttttctcaggtttgtcaaagatcagatagttgtagatatgcggcgttattcctgagggctctgttctgttccattgatctatatctctgttttggtaccagtaccatgctgttttggttactgtagccttgtagtatagtttgaagtcaggtagtgtgatgcctccggctttgttcttttggctgaggattgacttggcgatgcgggctcttttttggttccatatgaactttaaagtagttttttccaattctgtgaagaaagtcattggtagcttgatggggatggcattgaatctgtaaattaccttgggcagtatggccattttcacgatattgattcttcctacccatgagcatggaatattcttccatttgttcgtatcctcttttatttccttgagcagcagtttgtagttctccttgaagaggtccttcacatcccttgtaagttggattcctaggtattttattctctttgaagcaattgtgaatgggagttcactcatgatttggctctctgtttgtctgttgttggtgtataagaatgcttgtaatttttgtacattgattttgtatcctgagactttgctgaagttgcttatcagcttaaggagattttgggctgagacaatggggttttctagatatacaatgatgtcgtctgcaaacagggacaatttgacttcctcttttcctaattgaataccctttatttccttctcctgcctaattgccctggccagaacttccaacactatgttgaataggagtggtgagagagggcatccctgtcttgtgccagttttcaaagggaatgcttccagtttttgcccattcagtatgatattggctgtgggtttgtcatagatagctcttattattttgaaatatgtcccatcaatacctaatttattgagagtttttagcatgaagggttgttgaattttgtcaaaggccttttctgcatctattgagataatcatgtggtttttgtctttggttctgtttatatgctggattacatttattgatttgcgtatattgaaccagccttgcatcccagggatgaagcccacttgatcatggtggataagctttttgatgttctgctggattcggtttgccagtattttattgaggatttttgcatcaatgttcatcaaggatattggtctaaaattctcttttttggttgtgtctctgcctggctttggtatcaggatgatgctggcctcaaaaaataagttagggaggattccctctttttctattgattggaatagtttcagaaggaatggtaccagttcctccttctacctctggtagaattcagctgcgaatccatctggtcctggactctttttggttggtaaactattgattattgccacaatttcagatcctgttattggtctattcagagattcagcttcttcctggtttagtcttgggagagtgtatgtgtcgaggaatttatccatttcttctagattttctagtttatttgcatagaggtgtttgtagtattctctgatggtagtttgtatttctgtgggatcagtggtgatattccctttatcattttttattgcatctatttgattcttctctctttttttctttatttgtcttgctagcggtctatcaattttgttgatcctttcaaaaaaccagctcctggattcactgattttttgaagggtttcttgtgtctctatttccttcagttctgctctgattttagttatttcttgccttctgctagcttttgaatgtgtttgctcttgcttttctggttcttttaattgtgatgttagggtgtcaattttagatcttttctgctttctcttgtgggcatttagtgctataaatttccctctacacactgctttgaatgcatcccagagattctggtatgttgtgtctttgttcttgttggtttcaaagaacatctttatttctgccttcatttcattatgtacccagtagtcattcaggagcaggttattcagtttccatgtagttgagcggttttgagtgagattcttaatcctgggttctagtttgattgcactgtggtctgagagatagtttgttataatttctgttcttttacatttgctgaggagagctttacttccaagtatgtggtctattttggaataggtgtggtgtggtgctgaaaaaaatgtatattctgttgatttggggtggagagttctgtagatgtctgttaggtccgcttggtgcagagctgagttcaattcctgggtatccttgttgactttctgtcttgttgatctgtctaatgttgacagtggggtgttaaagtctcccattattaatgtgtgggagtctaagtctctttgtaggtcactcaggacttgctttatgaatctgggtgctcctgtattgggtgcatatatatttaggatagttagctcttcttgttgaattgatccctttaccattatgtaatggccttgtctcttttgatctttgttggtttaaagtctgttttatcagagactaggattgcaacccctgcctttttttgttttccatttgcttggtagatcttcctccatccttttattttgagcctatgtgtgtctctgcaggtgagataggtttcctgaatacagcacactgatgggtcttgactctttatccaatttgccagtctgtgtcttttaattggagcatttagtccatttacatttaaagttaatattgttacatgtgaatttgatcctgtcattatgatgttagctggttattttgctcgttagttgatgcagtttcttcctagtctcgatggcctttacattttggcatgattttgcagtggctggtaccggttgttcctttccatgtttagtgcttccttcaggagctcttttagggcaggcctggtggtgacaaaatctctcagcatttgcttgtctgtaaagtattttatttctccttcacttatgaagcttagtttggctggatatgaaattctgggttgaaaattcttttctttgagaatgttgaatattggcccccactctcttctggcttgtagagtttctgccgaaagatccactgttagtctgatgggcttccctttgagggtaacctgacctttctctctggctgcccttaacattttttccttcatttcaactttggtgaatctgacaattatgtgtcttggagttgctcttcttgaggaatatctttgtggcgttctctgtatttcctgaatctgaatgttggcctgccttgctagattggggaagttctcctggataatatcctgcagagtgttttccaacttggttccattctccccgtcactttcaggtacaccaatcagacgtagatttggttttttcacatagtcccatatttcttggaggctttgctcatttctttttattcttttttctctaaacttcccttctcgcttcatttcattcatttcatcttccatcgctgataccctttcttccagttgatcgcaccggctcctgaggcttctgcattcttcacgtagttctcaagccttggttttcagctccatcagctcctttaagcacttctctgtattggttattctagttatacattcttctaaatttttttcaaagttttcaacttctttgcctttggtttgaatgtcctcccatagctcagagtaatttgatcgtctgaagccttcttctctcagctcgtcaaagttattctctgtccagctttgttccgttgctggtgaggaactgcgttcctttggaggaggagaggcgctctgctttttagagtttccagtttttctgctctgttttttccccatctttgtggttttatctacgtttggtctttgatgatggtgatgtacagatgggtttttggtgtggatgtcctttctgtttgttagttttccttgtaacagacaggaccctcagctgcaggtctgttggagtactgggccctgtgaggtgtcagtctgcccctgctggggggtgcctcccagttaggctgctcgggggtcagggacccacttgaggaggcagtctgcccgttctcagatctccagctgcgtgctgggagaaccactgctctcttcaaagctgtcagacagggacatttaagtctgcagaggttactgctgtctttttgtttgtctgtgccctgcccccagaggtggagcctacagaggcaggcaggcctccttgagctgtggtgggctccacccagttcgagcttcccggctgctttggttacctaatcaagcctgggcaatggcaggcgcccctcccccagcctcgctgccgccttgcagtttgatctcagactgctgtgctagcaatcagcgagactccgtgggcgtaggaccctccgagccaggtaagggatgtaatctcctggtgcgccgttttttaagcctgtcggaaaagcgcagtattcgggtgggagtgacccgattttccaggtgccgtctgtcacccctttctttgactaggaaagggaactccctgaccccttgagcttcccgagtgaggcaatgcctcgtcctgcttcggctcgcgcacggtgcgcgcacccactgacctgcgcccactgtctggcactccctagtgagatgaacccggtacctcagatggaaatgcagaaatcacccgtcttctgcgtcgctcaacgctgggagctgtagaccggagctgttcctattcggctatcttggctcctccccctggctgtgggtttcttatagatggcttttattacattgaggtatgtcccttgtatgccgattttgctgagttttaatcataaagcgatgctggattttgtcaaatgcttttactgcatctattgagatgaccatgtgatttttgtttttaattctgtttatgtggtgtatcacatttattgacatatcacatttattggtatatgttaaactatccttgcatccctggtatgaaacccccttgattatggtgaattatctttttgatatgttgttggattcagttagctagtattttgttaaggattttagcatctatgttcatgagggatatcagtctgtagttttcttttttggttatgtcctttcctggttgtagtattagggtgattctggcttcatagaatgaattagggagggttccctctttgtcatgtggaatagtgtcaaaagggttggtaccaattcttctttgaatgtctggtggaattctgctgtggatccatctggtcctagacttttgttgttgttgttgttggtaatttaaaaattaccattttaatctcgctgcttgttattggtttgttcagggtatctaattcttcctgatttaagctaggagggttgtatttttccaggaatttatccatctcttctaggttttttagtttaaatgcaaaggtgttcatagtagccttgaatgatcttttgtatttttgtgatgtctgttgtaatatctcctgttttgtttcttattgagtttatttggattttctctcttcttttcttggttaatcttgctaacagcatatcaattttattcatattttcaaagaaccagctttgtgtttcatttatcttttttatttttttgtttcaatttcatttagttctgctctgatcttggttatttccttttgtctgctgggttttgtttgttcttgtttctctagttccttgaggtatgaccttagaatgtcagtttgtgctctttcagtctttttgatgtaggcatttaaggctatgaactttccccttagcccctcctttgctgtatcccagaggttttgataggttgtgtcactattattcagtttgaagaacttttaaatttccatcttgatttcatttttgactcaatgatcatttaggagcaggttatataatttccatgtatttgcatggttctgaaggttcctttggaatggatttccagttttattccactgtggtctgagagagtgcttgatataatttcaattttcttaaatttattgaggctcattttgtggcctattgtatggtctgtcttggagaaagttccatgcactactgaatagaatgtgtattctgcagttgttggttggaatgttctgtatatatctgttaagtccatttgttacaaggtatagtttaaatccattgtttctttgttgactttctttcttgatgacctgtctagtgctgtcagtggagtattgaagtcccccactattattgtgttgccgtctatctcatttcttacgttattagtaattattttataaatttgggagctccagtgttaggagcatatatgtttaggattgtgatgttttcctgttggacacggccttttaccattgtataatgtctctgtcttttttaactgccgttgctttaaagttggttttgtctgatataagatagctacccctgcttacttttggtgttcatttgcatgaaatatctttttctacccctttactttaaatgtatgcgagtccttatatgttagatgagtctcccgaaggcagcagatggttggttggtgatcttatccattctgctgttttgtatttttttaagtggagcatttagaccatttacattcagtgttaatattgagatgtgaagtaccattccattcctcatgctatttgttgcccatgtgccttggtttttttgtttttgcttttcaaattgtatttttgttttataggtcctgtgagctttatgctttaaagaggttccattttgatgtgtttccaggatttgattcaagatttagagctccttttagcagttcttgtagtggtgacttggtagtggtgaattttctcagcatttgtttgtatccttctttcatatatgacgcttatttttgctggatacagaattcttggctgataattgttttgatggaggaggctgaagatatggccccagtcctttctagcttgtagggtatctgctgttaatcctgataggttttcctttataggatacctggtatttttgtctcatgtttttctttataggttacctggtgatgtttttgcaatgaatttcccaggtgttctttgagcttcttgtatttggatgtctaggtttctagcaaggccagggaagttttccttgattattcccccaaatatgttttccaaacttttagatttctcttcttcctcaggaacaccaattattcttagatttggtcgtttaacataatcccagccttcttggaggctttgttcatattttcttattctttttcctttgtctttgttggattgggttaagtcaaagaccttgtcttcgagctctgaatttctttcttctacttgttcaattctattgctgagactttccagagcattttgcattactagaagtatgtccaatgtttcctgatgttttaactgttttttctttattctatctatttccttgaatatttctcccttcacttcttgtattgatttttggatttccttgcattgggcttcacctttctctggtgcctccctaattagcttaataactaacctcctgaattctttttcaggttaatcagggatttttttcttggtttggatccattgctggtgagctagtgtgattttttggggagtgtcaaagagccttgttttgtcatattaattaccagagttggttttctggttccttctcatttgggtaggttattattaagtcttagtagttttggtgagcctgggcccttggactgtgaacttcacaagtgcttcttagtctatcccttccctccccttaggtggaacagctagagtggctagagctgggtatccccctacccttaggtcagttaggctgtgagaaaaacctaagtaatttaagctctggtaaattagtttctcctgagggcaggccttgttaagaaaactagaatgttttggtatatttaaaaattacttttctcctaccccttttggaaggatgaagagatttttctccagtatttactgtaagaacttggttgagctcctggaggtaaaactcacaaaagtgtgttgtgttttgggtgccgcggtggggggtggcgcttgataactgggccccactggagtttttcatctctcagacttgtccacactgagcctccagcaatttgtcaattacagttcagggcttccctactcctggcactggttcttgcagaggtttctgcttgtgggtttctgctctgttaagttgtgattgtttctatttgcttgtctgtctctctaattttgggggcagtagtttgccctgtgacttcacttctccaaaagacctaataagagttgctgaattttttttttttttttttttttttttttttttgagatggagtctcacattgttgcctgggctggagtgcagtggcacgatctcggctcccaggttcacgtggttctcctgcctcagcctcccaggtagccgggattacaggtgcccaccaccatgcccagataattttttatatttttagtagagacggggttttaccatgttggccagactggtctcaaactcctgacctcatgatccgcctgcctcaacctcccaaactgctgggattacaggcgtgagccaccacacccggctgagttgttgattttttagtttgttcagctttttacttgttagaatgaagtgatgactgccgacctccttatgtgccagactagaaactgggagtctcctatttagtcgtccttaaaaattgtaagctggacattgttggtgatgcattgtagcaattctgatttctgttacctgagagtgttgatttttgttttcactggcagctaatcagtagtcagttcccttgaacttataaagccttagttttacactttgttaggacgagtctttcagatttttcccttgatcttaggcagatccctcagtcctgggacacagtctctactcctagcatgaactgtttgtcaaagctcatgtcactgccctgtactggcaatgaagaataatcaaattctattccaaactgtaggcaaagacaacaactattaatctctactgatcaacttgactctcagccacaggtggaaaaccagtaataaaaaagggttgtctaaaggctttgagatctacccattctcctaaatatttcaaattttatttctggccagattggaccagaaggctgaatccttaggtggtatggctttgcccctatagacttccttgtattgagttgcatgttggcatctgccctcatcatatagtaaaggatgtgataagaagtcgtcagtggaaccatcctaatctcagttttatttttcataagaatgccagtgagcattccatcctacagggtcccctgtaggagaaggagccactggaagaatttctctcagattttagtgccagaaaaagctctgcttctcctgagcaactgataagtttctatctcattaatgtttggctgctgctaagctcagaagcaaagtcagtgtttaggaactcttgtaattttgagggctatcttttgctttaattccctttgtttatttaattatgtcatatttatttccatcagacccttaactgctttttctatagcaaagccaaaaaaaaaaaaaaaaagtcatcggaatcataaagagccaaggaagctgctatcattccaaacatttttgtccttcctcttctggatggctttcacagccagattcgaatccacgtaagactgtcatcttcaacccaaagtgaaatgactcacctgcctttctacttgattcaccaattggtagtcaagaaatcgattttcaaaaaaatcaaatttactcctaaagggcagaggttaaagatactttaaaaaattatatcctggctggtgtggtggctcacgcctgtaatcccagcactttgggaggccgaagtgggcagatcatgaggttaggagttcgagaccagcctggccaacagaccagcctggccaatatggtgaaacgccatctctactaaaaatacaaaaattagccgagcgtggtggcaggtgcctgtgatcccagctactcaggaggctgaggcaggagaattgcttgaacctgggaggcagaggttgcagtgagctgaagattgtgccattgcactccagcctgggtgacagagcgagactccaacttgaaaaaataattatatcctgattttgtgtcaataaagatacttgaatgaatgttctactggccctgaaggcgagttcaaggagaacttccaaatcattttagtgtggctgcagtggttcctgctgataatcccagcattttgggaggctgggacaggaggattgcttgaggccaggagtttgagaccagcttgaggaacatagcgggaccctgtctctggaaaaaaaaaaaaaaagttgggcgtggtggtgcatgcctgtagccccatctacttgggaggctgaagtgggaggatcacttgagcccaaaaaggctgaagctgcagtgagctaggatcacgctactgcattccagcctgggcaacgaagccagaccctgcctcaaaaaacaaaaacagaaatgaaaaaagcaaaacattttggaccacaggatcatcactggaaggagcaaatagattctcaaggtaatatttctttgacagagagagccatcattggaacatttggttatctggtatgtttgaattaatgtagaatcactcgcagctctcgtctttacaacacagggcaactgtcagggttagcgaggcatttgttgtcattccctctctaggtggagccagggcgtgtgatgggagcacggggcctgagctgcagcataagtttcctctgattttcaacctggaagacgataccgcagaagctgtgcccctagaaagaggtggtgcggagtaccaggctgtgctgcccgaggtcagaaaggttcttgcagacgtcctccaagacattgccaacgacaacatctccagcgcagattacactcaggacccttcagtaactccctgctgtaatccctaccaaattgcctgccgctgtcaagccgcataacagaccaatttttattccacgaggaggagtacctggaaattaggcaagtttgcttccaaatttcatttttaccctctttacaaacacacgctttagtttagtcttggagtttagttttggagttagccttgcatatcccttctgtatcctgtccctcctccacgccgacccgagagcagctgagctgcgctggctctgggcagggagtgtgccttaatgggaagcacacgggctttggagtcaggcacaggtgccagctccagcttttgaacttgggcaattgtttaacctaacctgcaagttgattttgagggttaaataaaggcatacatgaaaatgcctggcaaattacctgacacagagcagacattcaatacattttagtttccttgtttctctggttcccagtttctctggtcattttggtgtaaatccattctaattagtatttagggcagagcttctctctcttttctctttttttccttccacaaaccagtgtactcactggtctccatctttaatatgcaaacaaatcacctgggatcttgtgagaatccggattccgtctcagtagggctcgagtagatcctgaaatcctacatttctatcaaacaatgccttgaggagcacagatttagaccaaagttaggtcgttttccagatctcagagcagacgagtccatggataagtctgtggcccaatccccttcctctccttttaagggtgaaatgactgcatttaaaagaagttaaagagttcctcctgtcccctataaccacaaggaaacaaaaaaatatataaaaacctcaaaaatgcattgccatgattttattattagtgtccaaaatgggactcccaagtaataaatgatttattccagccacagccaaaaaagactttgcctggctaaaagagtctctctctaagtatgtaatatacaagaaatacaattcaaagagatgttcctataagtacattttttacacggcatatatttaaaaaggaggccccttttaatataaaattccggttatataccaatatggttaattagcatttacactatagtttgaacgtattttaaatagcatgatgtgtatacaatgtctcccgcgcccattggcaaccagggtcgtgggaagcttggtgaggagttaaccaggtcctgtggtttaagcagtggagcacccgggattcctgcccccctttctgctcacacaattgcactccattcttccgccttccttgttttctccaaaaccacctgataggggggatgtcctgatttctgaggtgtgcttctcatcatgactgcttcgttttgcccttctgatttccacggcacaagattatctaccaaaatcaaaacagaatggccttactcttctcaggaagaggctggtaggcaggtgcattatcaacaggtctgtgcccatgcagagtgagcagggagaggctgggcactgtggaatttttctgtctgaactcgctcatggccacagaatggtcacccagcttatttaggtgtagacaagtatgacacagttctagaaaatactgactataaaaatgtctctgtgtgtgtgtgtatgtatttatatgtatatgtatatatttttaaaaggctcatcttacttgtaaacatggactgctcaatcactattaaaaagtcagtttaggctgggcgcggtggctcacgcctgtaatcccagaactttgggaggctgaggtgggtggatcactaggtcaggagtttgagaccagcctggccaacatggtgaaaccccatcgctactaaaaaatacaaaaattagccgggcatggtggcgctcacctgtaatcccagctactcgggaggctgaggcaggagagaatcgcttgaaccggggaggtggaggctgcagtgagccgagatcgcaccactgcactccagcctgggcgatggagcaagactccatctcaaaaaaaaaaaagtcagtttaggctgggcgcagtggctcacacctgtaatcccagcactttaggaggctgaggggggtgatcacctgaggtcaggagtttgagaccagcctggccaacatggtgaaatcctgtctctactaaaaatacaaaatttagctgggcatggtagcatgcctgaaaccccagctacttgggaggctgaggcactagaatcacttgaacctaggaggtggaggttgcagtgagtggagatcacgccaacacattctagcctgagggacagagtgagactctatcatctc

SEQ ID NO: 134 - DNA, 116144 bp, Homo sapiens
aaacaccgtacgccacccaactcctcttgtaacgccatcgcgcgtggcattgtgttgggttctgcgtgtgtggcatcggagtcgtggaatttagggggaacaaggcttttccccccgtccccccggggtctcccttgggtgggggcgacacggccaaggcggcgcgccctgggggtgcccgggggcgcttcttccccagggcgttacgcaccggcggcccggcgcggaggtgcgcgggggcgatcgggagatgcggggcgggcgaggggtggtgggatgggcgccgccttaacttcgatcctgcggcggcccgagagaagccgtcgccgccccgcccgagctgggtgccgcggcactctgctctgcgccgcgcgtctccgcggctgcctctttaatcaggaacacagaaggggcgggccctgagccggcgcgtaatcggatagctctgccgcggctctgacatccacatgctgctcggcctgaaaaggcagtggggagccggaggggaggcagagatcgcgagcgaggcaccagcctgcagccggcccccagcacatcctcagccgcacagacactcggcgaggtggaggtgagggcgggcgccagcgaactcggagaggggctcgctcactcccaggcgatcccagccgccaccgccgccgcaccagcagcagcaacagcagcagcagcttccttcctcagactcccctcgagaggctggccaagcgggtgtagccgttgggggaggctcccgccgggggaacccggcgaggacaagagcagggcggccgccttccactcgggctgtccggcggcggctgcctccgcccgtgtgtccgtcaagggtgccgcgggatgtgtgtcagtttacgcctctgagatcacacagctgcctgggggccgtgtgatgcccaaggcaagtcttggttttaattattattattatcattattgttacgcttggctttcgggaaatactcgtgatatttgtaggataaaggaaatgacactttgaggaactggagagaacatatatgcgttttgtttttaagaggaaaaccgtgttctcttcccggcttgttccctctttgctgatttcaggagctactctcctcctggtgaggtggaaattccagcaagaatagaggtgaagacaagccaccaggactcaggagggaaacgctgaccattagaaacctctgcataagacgttgtaaggaggaaaataaaagagagaaaaacacaaagatttaaacaagaaacctacgaacccagctctggaaagagccaccttctccaaaatggatatgtttcctctcacctgggttttcttagccctctacttttcaagacaccaagtgagaggccaaccaggtaagccactgaaagtttttctatttattgcaacatggtttcccctttaaaagtgaccgctaaagcaggaaggccacgcagaacggcacagaagaaggctccctcagtactcaataatttaaagagagatcccagccggcccttcctacaccaccacggctgctaaaacccaactttcctctcctgctaggagtgtgtgtgtgtgtgtgtgtgtgtgtgtgtgagtgtgttttgaaacagaatttggcggtgttcatatgtcacatatggactgaatcaaaggtttaaaaatactacaaagcctttgcattacagtttttgggaattttttttccctgtcttgaagcagaacacatctcccttgagtttctccaactagccagtgaaatataaatcatttgcattccctccacttagctacattgagcaatgttaactgaagggcttgggaaagacaagagtttagttttggttttcagatgctgtagattctttggagaatgactggttatgcttcagaatcataaggctcaggctggtggagcaagttggcttgtggctgagataggggcttggggttgggtgctgctggcaaccaagacggttggtctcttctctcttcatccatgtgttgtctgggaaagtaaatcgtacgttcttttagaaattattattagctaaaacaaattgcaggccctcgaaggtctctcactcttgtgaagtggttagaaacttttgagtggaatttgttctcaaccactgccaaaaagggtgtgtggacaggctgctgtggagataagcatttcgaggcccagaacagtctggggaccgcatttgtggggagcggcaaggggtatgctctggaaaggggaatccatggggaatgcagtggggtttgtgcttccttctcggaccactctctagagtgagcctccctacccctctgagaacagtgtctggaatctaacaacaaaactcttagcagctgctacaggtgattggagatggagaaaccatctatggaggaaatgggtgaaagaaaggcgaaaaagccttcctgaagtgccctcacccaaggcacttgcaaggcgatggcggcagtggtagagctaactctgcagcctccttggcatccccagaacatcagctagtggatcctagccttgcatctggtactgtcacccttccttctcctcacgccccccaccagcacacacaccactttaagcttgggcatttatttgaggggggaagaaaattcaggaatgcctttgccacccagatccgcacgtttgcagctctttctttgccataagtggtcttcagggcagctgcaaatcctgccaaagggatgggtgggggtcccacttggggagattttctgggcctccgccgttcccccttgccttatttctaaattcccagcttgaagcggaattaaattaccactcacagacctggatgctgcgtaaattatgtatgtttgtgtgattcgctgtgtgtgtgtgcacacgcgcgcgcgccgtgaggatgcccacagtatattatgtattcagacacggactccagtaggccccagcgcgcgagcgcgcacacactggcactcacactggcgcgcacacacatgcaacttcaggttccgtgtgctgtgcggagcgggaggggtcgtgaagactcaggggccatctcctaccccagatgttcgcacatctgtccccgagcgctgcttggagtgtgtgtacgtgtgtgcgcgacacccgcttggacccactcccgctctgccacctgcctgccgcgctctctgcagaaccccctcccatcccaatccccagcagtgctgcgtcacttccagagaagcccagaggcgcggagttcggggcaacctcggacccggggtgggatctcagggtgggattcgaagctgggacctgccagggacctccagctccccaaaatgcgatctcaagccgtgagctgctcaggctttcaggcggagcaaagcactggcaccctgggagccggcagcgggtggccagggcgaggccaagccacatacctctgactcacccggtgtgcgccggccgggaagggggcctggttcagccgccgccgccggcgacgagaaccaattctgggaaggagcaagatggggcagaaggtgcgcgcgggggagcaactgagcaaataacacggcggtcgcggcgcgcggcaccttgggctggcgcgtggctgggaggccgcatgggcgacgcgcaccaggctgcccctctcctcactgcgccgcctcgccagaccgcagtgcagccgctagcctgcctccctccctgccccgggcgcccccgccagtcccctgcgctccgctctgcgcggcaggctcgccgcgacccctagagagacggctttgagtggcgggaggccgaggccggctggcttgggaatccaagcgctggcccaactaggtgagaggaaactggggtgggatttcggagaggagggcggagagaggcgggaaggaaccagcttgagccccaggaatgcgcgcaacttgcacagcctctagaagcgccgcgcgcccagcgcccgccggtgcgcaggaacaggtgaagagcacgcggcgtgcggccatccacgtggtggggacgtgatagcccctcagctctcctcctagccctccctccccttccccgccccccagcgccttctctaacgccgcatcgatttgtttgggctacgcagcagaaacagagcccagcgatccataaacattctattaagcaaaaatattcccagcgaaagcaaaaccgaggctgaagcctccgcgaagttggccgcctccaactactccatgcttgtgccctcctcctcctcctcctcctaaggacacccccagggaaaagcctgcggcatttcttcaacgctgccctatgccggaaagttaggtctcggctgcagcgctggtctctggagaagcctctgcctgcagccgccggcgagttcccgcctcccctccccagccgcctcgctctttgcttttccacgtgagaaaaagaaatgttcacggccgatgcttcattttcactgattgatttctttttaatatcaacacaagttaatggaggcaaggcgcgctctgattgaagggctgcccccgcccttcgactcgggctggctgtgccgggggtctttcccaccgggtcgcaggcgtccagcggctgggtggcgggcgccggtagccctagtgtttggaggtgggggagggatttggaatagacttgtcgcccctctgggaatcatctgggttggggaaccttcgggaatcagctttccagaccaagttttaggggatcttgcccatatgcgttgcggcttctgcggctccggctgaatttcttctaaaagataggagatccacgctcaggtttattggcgtgtgctccctgctcggctcccctccctccacttcctgttctttcggtttcagacagagaggagagccccctggcgctagccattcccgatcagcgcccactacgaacgtcccctttgctagagttaatcatgatctgcggggggactgggttttgctcagaaaatcattcaagtcctgacaatgggtttcttcaaatggtggcaactcccaggcctaatgtccccacctccgggacacatcgcttggggccaaaagaacccagaccccataaccatctacccctcccctcctcgtctggagagctttgatctatgcttgggttttaacgccattgccatggacacgcgcagattctcggtcaattcacccttccgtctggactggatgatcagataagaggtgtaaattggctgtgggagacaggtctgggttcagacaaatcctgaaagagaagcaatgacggtctaggcgccggataagggtttgaagtgtttcttttagcctgtctccccaaaatgtgagatggccattggcgagcataataatttgcaagtaaactgtaaactcctagattttacgcagacggcctgctctgggctctagggattggtctcatgcccacattaaatgggtacccagtaaacatttttcccccgtgatcagctcctggaggtagggaagctgtggccagttgccagcagagcacacagtgcaagacagtggcaagaggagcactccccaaagggccccgggcaggcccctactcgtccaagcggtgcctggtggaattgtgaatgcgccagtgcacatcaggtttggagttttatgtcatcccatagagccctcagacattaagctacggagcactcaactggcaaaatgaaagattggaaggctgcagtgactggaacccaggctacccagacaggactcctgctgtctaccaaatggctctgatcccctgctgttgaatgtatcaagtccacgttctgcagcagaaaggccagttcctatcttccaggcatagaaaaagctaggaatccaaatgccaattcatatgcagtgaggcacgaatacaaatgacagtgagggaggggtctggggtcagtgaggagagacaccagggaccagatgattctggggaccctggtgtttttcatttcactcaagtcttccctaaagcaatcaggaaaatgaactgactcaggatgacctgagtgtaagacaattctgagttgacagaattcaagagccaggtaaagaggtttccaaatatattctccaaaggtccagtttggaaagactttaggaacttgagctgagatcttcctttcttaaaagatagagcaaaagaagaatatctttttaatttcttgaactgacaagaaaggacttgaaaagtgtcatctgggcaatggcttgtagtgttattaacatatttgaggtattttattatctgaccatcacttgcaactggataatctttgagataccttccttgagtggcagataagtatattgatcaccagaagttagtctttgtactgttccttccaggtaaggacttggctgtttgctgatttttgttttttaattaacccatttctggaagatgctgcagaagtttgtcctggagagctacagtatttttcaaagctttatctgccttgatgagaaatggtcagaggcttaatggtttcattgcctaacaggattcagtggagtaggattccaggacacagtggccttgtatcatggctggccctccaggagaaagcatcttctaaaggtttaggaagctgtcaagtttagataaggctgagctccgatcctctgggaccttggttgtattaataaggagaaattaatttttaaccactgggaacattgccaaattatgtgacctttggcagaccagctgtgctataaaaataaatcccccatttctgaaaatgctactcctatccagtagaacaataacaatgtggcatttaggatagagaagagtaggattgagaagaaaggagagaaataggagttggcaaaaaacaaaaaaacaaaacaaaacaaaaaaaacaaaaaaacccttcgatgttgtgatacatggtttcagacctgaacttcctatccatcacccgccctccccggccccatgcctagggtttccagaacacaggaaagagggccaggatgacaaggagctgagtgcctgtgtgtacagggagtggagaaggtgttaagtgcttccagcccactcacaccccagcctcaaacacatctctcattgttcacacagacagagtactggcacaggcagagaaaagggggttttcaaacaggcaaaatatttgtctttccctaaatgctaccaagtaggtttgccactgagaagttttgtggggatcatccctggccttcccagcttctgaaacatgggaactagactgcctgggtttagaatctagctcagccacttgctggctctgtgatcccagtatcctgtgtgatcagatacttagtctatgtgcctcggtttccttgtctgtaaatgtgtttggtaacaatacctacttcatagggttgttgggctatgtcagattatgtagaatactgtttggcacatatgaagcccattctgaagtcactgaatctttaaaactgtttcagtggggttagtggaatctcgtgatcgtagaaagcacactataaccattgtggtaagttgatttttatgagatttaaaaaataattcttattctcagttcttccaccaccaaacctctgtgttttgtaagcaccatattatctctcgccatgctcttcttcagagaatattctctgctgagttcttatcttagatttatgtctcccttgcattttttccctccttcttcctctgttttcagtattcttacctcctattttctttttaatctctcatttcctttccttttcctccccttccatccttcaacactgagagtgtgctcagcagggaacaccgtgtttaaggcgctctcccgaatgtgtaataacttctactctggcactaaggcccttcagcagctgaactcaaaaaagtcatcataaagacaaaatagcttttacccagcaagggtcttaataatcccatttccctctgggtcttcataaaggagtcattatctaatccagaaaaaaaggaggggctgggaataacaaaagagaagctctcggtagcacagagtgcacgaggctgccggccagctgagtgcacgtggccgtggtaccctgctcccgcctccacaaatcctgcgataaccagtaaccagttctggcgagtctttcagcagagaagataatgggaattgcaaattactagaccgaatgctaataataattgtttggatacaggagaaaaaataaaacagatgttccccaaaggcattctaggggctacagaaaggaaaatgaggagggggttgagtaaagagaggtttgctgaaaccaagcacaagaaaatccaataccaacaaatggcttagtgatgaagtaatagtcagcatcttcctggtggtacagataaccaatatttaaagttgcctttggaagtgtgggggttggagtgaaggggacaaaacccctgagataaattaattttactagtattaaaaataaaatggccgagcatggtggctcatgcctgtaatcccagcactttgggaggaggaggtgggcagatcacctgaggtcaggagttcgagaccagcctggccaacatagcaagaccccatccctgctaaaaatacacacacacacacacacacacacacacacacacacacacacacacacacaatagctgggtatggtggtgggcgcctataatcccagctacttgggaggctaaggcaggaaaatcgcttaaacttgggaggcggaggttgcagtgggccgagattgtgccactgcactctagcctgggtgacagagtgagactctgtctcaaaaaataaaataaaataaaataaaatgtgaatgtgctttgaaatttatcattattatctgctttagggtgttctaggagacatagttcgcactaactctaccttgacctacttgtgactaggtattattatcccagacaagttattcaaactctcaattcaccactaagaaacatttgcacttaataacagctgggggtggggagggaagcgcagtagctgtggccgcagaataatttctgatagaactctcagagtctgtcctatctagtgatacctttgatgttcctttggtcacttcttaattggttaattcaccaaatcttgatgagtctgacttttgggaaaggttctggtttgatcctgtaagacttgccaaagatggatcagcaaggagtcatgacctcaagttgctggtggctcagtagactggatgaggccctccagaactctcacacatctcagaagatgctaaagagcttcagcctctcagatgcacagaggagaaagaccactcccagtatgggagaggagaaagggcagaggcagcctggagtgagagagtaggtgggatttagagcagggaagggcataccaggggaaggggaaggtgtgagtagagaaatggatgctgggttggtttggggaacactcagaagctgcagtttagaatgtatggtgggaaataattgcaaacaagattataaataatagcttgggctcaattcaaggcccaaattgctaggcaaagaggtttgggtttcacttgctaaccaatggggagccattaatgtttcaacataagcttcagttaatcaaaataaatgaagacaatattatattacttttttttctcctttggtttttggagagacctcaaaattattcttctgtttccttccccaaatgtctcctaaaatggtcaggaattgtaatcccagatctctcatcaatggcatcaaaattgcatttgcaatgagggctggaaaagagaggacataaatataaactaatgacattatatcggctgccctattggaattgcatttgtttatgatataagatgacaaataataaggttaacacaggtggcatgattcgaggtcaggagaggtaatcgcatcaaacttacattttaccgattaaatgaggcttcatttttagaatctagattgaggggagagatgttcaaaaggccccatttccagacccaatttccagttctctcctaagtgaattcattggaggtgttttaagagagggaatttgcttcattctttattcatttccaaactcatatgctggcttcctctcctgctctctgcttccctctctccttccctcctagatggcccttttattcagattttgaactttatcatttcaaaagttcagaaggatttccatttgctgtgccttcaggagtgcatcattcactgccaccagtctccataaattgagtagattgcatcccttcccagttgccttaggaagtggtcaaacagccacattcctgggctgatggattggctcatttcttcccagcttaagccaagatacagattttatgagactgtcttgtgacaggctgaagttgctttgaataaaacaaaatccagcctcagctcacagaaataattcttaaaacgcagcttatcccgggttggtgagcaaaatttggttaaaaccctgagccaacgacttagatgatctgggtgagggatttgaagaaactccttttggtttttcttttcatgcatcactgttgttgacatgctcacacacagaactgtgtatccataatatttataaatatgcagccacagactcagttacaaaaagaaactcgtgttagtagacctgatgtgattaaaggagacatttgaactctccgtaatgcaagacagacatgttttctgaagaatcctggagtttggtttcaggcttaccaagcagatagaacaggggtagcaccttgagtaaatgtcttattgtctaggagggtagagaatcttttgaattcttggctcaatctgtgggttataagatctattccccacctcactacatgggctttggattttagcactggaactgacctttagaatcacccctctcattctatagatgagaaaacaaaggctcagagttgtctactagcttacccaaggtcacacagcttgctagtggtgagactagacttgattactaggcttttaaatcctgctccaatgctatttctaataaacttcctggtggagtaagtggcaaggtgacaacctcctttctttttaagtagaagaaagagtttcttctttgccttgctaccaataattaaatgaaaacaatgctgtggaaatagggacaaagtgggattatgctgtagataagaaataaattataaagtagataaagtatattattttcagaggaaatgagaccgattgcttttctccactaagtgccctcaggtatacataggaaatagatgtctcctagtcatctgctctttctcttttccatagcattttaaagtaacagggaatggagatgccccatttagagggtttcaaaccatgttccaggaagccccagtggacttgcagagaagcccttctgagctgagggcaggaactaggaggcctggacactacaatgcttctggctacctccctcccagcatccaagaagagctcccttttatgttctttgtacatgggaggtctaggtagagttttgttcaagaaaaaaaaaaagtacttcaaaaaaagcaaataaatttgaaagctacacacctaattcagtccattctttgaattacagtttgtgaagctgagccccagaaaggtcaaattgagtgagttaagagttgggtgccatctcccatctttctgctaatgtcgatccctccctttcctggtaacccagtcccatcaccccagactcaccttttacaacaactgggccctctaatcccacattcagccaatggccaagtttccctggtttcgccaaggactttttccttcagttcaactaaagcgagggatctgattggtcttttaccaagctgtcgtgaagtaagctatagtaatcagattatctgctacagtcaggcttcagtatttagcaaatattattgtcaagttcaggttatccagtgttcctttaaaacaatgccaactacatttttctagaaggcagaccagatttttaaaagatcttcttttcccattcttaatacttcttaaaaattaaatattcgcaaggaaagtgattgggttctgtaggaaggtgagttcctaagtgaaggggtacaacatccctttgccttttcagggctatgttacccctaggcagaggcagatggtacttagactaccagcaaaacaacaatacttaagaaggagaaaaagagcaagacagaaagagtttaaaacaatctgatattttacatttcaaataaaaacacctaagtagtacttataagaggaaaatcagaacttggtgacttcagaacttagtgttctctttatttccaattacatctggagctgtcactttattcctttcagccttgggcctttctcagacctgacctggctcatccctcagccttccctcccaggtataggagaaaatgctctaacagtccaagcctggattttgctatctctcttcgggtgatgaatttgccccaggtgaaaggtattcacaaaatagttgcagaatgaagtcttttgtcaactcacccagcgggctcagtagctcaaacagggtcaatttcccctctgtacatggagattggccttaagggttttgcccttgagttcaactctcctttggcttagcttgactcctctgaaacagaacagcaaccatgtataaagttcattgtggaacacaataaagacctacaaagtaatggatggtatagctcttcagaagaaattttagctaatttctattgggacatgtttgtatttaggaaatgatgtgtccccaaccctagaaaggaaagatcagttatcaagaggagaagtagaatgattaagtgtgttttctttacaatttttactgatatgtttcaagaattctgttctctccaagaaaaataaaaacagaaattctagtatttatctttgtggatatatgtttgtgcaaatgatgtgtgatattttatgagaaggtgtgaacgtatgtataggactaaagtgtgaattactgatatgtatatgtacttgaagtatgttcaatatctatgtttgtgtgtgtttctgggtgtgaatgcaagccaaacaagaatgtgaatttataaatttgtaagtattgaaaaggttaccaacacacaactgaagcagatgttctaatgagttctctgatacttcaataactgccctgattttctccaggtaaagaaaggatagaaaaaaagcaatggatgactcctttttcttttggtttaacagcagacagtacagactatcagctatgggatatatatatagtttaatttttttgtgtggtggtggtgaagaaatgatcacttctgctgtagatgagaaattaaaccttcctgcgaagaagtttcctgtctttattgctgatctgtgtgcctggtctaattactaaaagtttaaacctggggtgtggggaattgagggagaaaagttcccctttcaagagtaattggagagaagtagaggaagggatggggaaaggagggagagagtgtgggtagggagagtggagagtatgtggaaaccataacagttactaaacaggagctcagctcaggtttcctctgacgaattccaaggcaaaaaagtgtggtttggggtgagttggtggcagggctgcagttttctgcaaaatatctggcagaggagctggacccggtagaaaattcccccttctgctagttgagtaagagcagctggtgatctatgtcctcacacctctgccttctcagaggaccactccaccctatttcatgtgcataagccaggaccaacgggcctcaatttggctggctagatgacattaggttcccagcatgggtgagtggtgtgggcacctggaaagcctatgggtattggctgcagaggagctgggcctcatggctggcctcatgtggtctgggtgggagggatgagctcattgtcttcatgggctggggtgggtgcagggtcattaggtaagaagatgatgtgctgtgtaccagcctgaggaaacggctgcttttgttttccacccagtaggaaatggacctgaattcattccattctgggcagttcaatacggcacagtttgagctcgtggaggcttgatgccgaaaaggctacttgtgtggatttgtgtcccaaccacccgtgtgcagcgtgcccatcttttatgcatttaaagcctgtcaggccggtagtctaaagcagaggtctgggagatagtaatgccaacagacatggggaatagtaaagtgcacctgtagagttaaaaaatgcatgacctgttccctcaaagagtgaacacaggagaaagacccatcctggagggcggctgctgagtcgtaatacataattcacgggcccatgctgctccatgcagatggcgatattaaatcgtgattgatgctaagagacacacacatctcaggaaggtctccgagaggcttctgaatatttccatgtctcatgtgccttcccagcttctgttctactgtggtatttaagcaaaactccctatttcccaagaatccctgctggggattgcagaactttactcccgaatagatgagattcctcaaatgtcatcacccacctttggagcctttgaaggtggctcccttccctcccaggccacatgaagctgtctgcctccagccaggcactgcaggtacagggagccagcccttcctgcaaacggccagttatggctggacaaagcagcagcacactctggtggtggtgaccaggcaggagggacagtgggcagacagcgcagaagaaacagatgttcattcaacacaaagcacctttgtcgaaattccaaggctagagccagtagattctctaatacagatttttccattcggtgtataatgaaataataaatcaaatttgtggtatatatggaattaaatgtttggggggtttgcattttttttcttaaaaaaaaatttaaaaaggctgcaatcaccctccagggcctgttctggcccaaagctgaaagtgcttcctctgcaccacatgtaattgttaccaggctcgcttgtgggtcggcaccacaaaaccaccattgtcagttcccagagccctgactgctggctgcctgggctgggctgggagacaccgaataaaatgaaggatttatgagataaagatagagataggaggttgaatgaggagaggaagatgggccaaggaggggaggcaggaaaggcagggaggcatgttgagtttgcagtcctcttgtttttttaatcacagaccatgtaattgagaatatttatggccatgttctggaatactttcatctgtgtgtgtgtgtgtgtgtgtgtgtgtgtgtgtagttgggtgggtagggggagggatgagccggaataatctcttccaccgaatgagtaagtaggttagtcttctggactgccataaaaggtctgtaaaatagttttaatcagacactggtacagaagagaaggagggagtgtggggggaagaaagttgtaacatatttgaagttctttgggtcgttgatttctctttcagacccaccgtgcggaggtcgtttgaattccaaagatgctggctatatcacctctcccggttacccccaggactacccctcccaccagaactgcgagtggattgtttacgcccccgaacccaaccagaagattgtcctcaacttcaaccctcactttgaaatcgagaagcacgactgcaagtaagcaccgtcctgtcccactgtgtatcccatccatgagatgcacacgccctgcccccacccctgctcttgtcacttctatcacccctcaccccaagacctgctgctaaccagtggtggatcctggccccagaggaaaacctcaaggggcattccctttccagggaaataaaggtgtggctgatcccacagtatggtggaaagagccttcttgagtgaaaagtagagaatattaacctacctccaaaggccggtagtggaggagaatttccatgtggtggcaggggctggactacaaaactctactcttgactttgggttaccttgcacttggagatctccccatttccacagctgctacatgtataaaccccacccacttccttaataagatagtagctgtatccccaagtggagacttccctcgcatccagccacgcaggatcagcctgttaccttatatagcggtaactggttttcttatagaaaaaaaaaagggtaaaaaaaaaaaaaatctaagtagttctaagattcacattggttcttgatagctgtgctacacaagtagagtctcaaagtcagtgtcatggatttatttaacaaacactcttctaattgcattacaaatattaatccatttactttgcacagtgggccctgggaagttagtgccattatgatctccattttgcaaaagagagaaaaccgaagcacagagaggttaggtcagtcacccaaggtgactcagctggtcttacaacattggttctgccaccctggaaatgtgtggcttaggaactcccaagtggacatttagacacttgggagtactttagaaatgccatgttactaccgaggtccctaaaagttaaggttgggaagcaggcagcatgtctagaatgcagatgtgctttaagctgtctactgagctccatcttaaagtcttttctcattggaaataaagtgagagtttttgtgcagaaaagaatgtgccaacagtcatattctgccccaaatgagcgcctacggaatgctgttactctgataagtattcagtgctcccatgtgattcataaattgtctaagcattccttgctattaagcaaggaattgcaaatactgaaaaattaataagggggccagctggcaggacaggtaccaaggagaaggcaaaactcctacaggccaggtctgggccagcacttcctcatggaggaaacaaggcccctctttaactagtgctagactgtgaggctcagtgaattgatgtcattattatccccctagggctaatttgcacctacataatggttttctcctaacaagaggtagcctttgttgaaaaccaaagggtttcccggatgaatgcctcatgtgacgaagagtcataagatgaagtttctaatcccagatccactcttgactcaacggatgacatagggaaactcatcagttcctctttgtctaagttacatgagtaccctggatacatttgctcagcatcccaaggcttctgattccctgacagtgaactttatcaaagatttctgttagaagagcttctttataaggtgttttgggctctgattcctctggctggactgcagaaggttggcacaaatggaagcataatgtacagagagagcctgggtctaagctcagagaaatttgactaagcacctttctctactaagggccaaattctgttatgcttatgacagcaaatctcccaaggaaattgccaagaggtcatcctatgttgtattcatagtggcagagggagaaagcatggcttttggaaggaaaaacttaggagctagtaagcatggcttaaaacatgttgggaaggacgaaaggccagaaaggccctgctttgggttgcagggtaccccttccatggacaggactcagtcccagagatggggagaactgaaggttgccagagactctgacaaggggaagaagaaggcattgccccttgctggaggtggagtaggggaagccagcaatttacagggttatcttctggcttatcatcctcgctaaatcacttcctgtttttctccccattccatgacctcatgtgtctggtttgaacctaaaaagtgaaggaggtcagaaaaaaatctttctggggtctgtttctcccagtgccaaactgtcagagaggctctgttgggattaagcctcatccacttaaccttgtcattaattctctgttcctccccccatttctcccccactccccatttctctctctttctctctctcattaatttttgtatttagaaagactcatctggttttctcagcctctcactcttcaaggtatttttgacatttcccctggccatttgcatttgccataaatgggcttcccctccccactgccttgttttactttcttgtgaaaggaacaattaatctaattgaagtcctggaagttctgtcttgttccggctctccctctctcttccatactgcattttcgttccaagggagctcctgggtttggaaagcactcactctccaaggaaattagcctgctttctccttttattttgggtgcatgcttcaaattggatttggctctgcaggcccataaggtggatacttcccaaaagaaaactgcctgggctggtcttccgatcacagagcacagcagcaatgccccagcaaaaaggggaactgagcaagaaagtcaggagaagcagccaactcagctgtggagacagagcagtggtcagcacacccaacctcgtgtttgcccgggttcttcctacgtgcagggttaactgcaaagattgccccaaagcctggaaacagggccctgatatgaaagaatttatcctgggctgtggcccctgggcccttggctccctgtataccttgaactctacatcccaaaggttgagacggttgctgagtaaaccccagatagaccttttcccctaaccgttgcttattaactttgttccattgaagcttgctgtctgcttggaaaatttcactcacaagccgcagctttgcctgactcagtgcaatccaaggccaccatctctggtgaacttcccttgactcctccctccagccacttgcagaaatgcaaatcctgggcacccacaggctgtttgggggcctgtatagaagctgtgggcagaaaccagaggccactgtggtactgctggactcctgcagccaaaggacaaaagggcgagactacgggccgtctgggcaaacagagagaagccactttattccctgtggagtggaggatgctaggatgttgctgctccggcagacagaggcctttcgcttgagtcatcagccaacagactgaatgttatggttttagaaacccatacacaaagttgagtggttttttccatttctaaaatttaaaatgtatgtatttttaaaacacccacctgcatgtaatacacagcttgttcaggagttctcaaacagccccagcacccaccccatcccagaggctcaaccaaataaaaccaaaaccaggaggctgggtccttttaagcactggtaatttctacctgtaattccagccctttgggaggccgaggcaggcaggtcacctgaggtcaggagttcgagaccagcctggtcaacatggtgaaaccccgtctctactaaaaatacaaaaaaaattagccaagcttggtggtgcgtgcctgtaatctcagctactctggaggctgaggcaggagaatcacttgaacctgggaggcagaggctgcagtgagctgagattgtgccactgcactccggcctgggtgaaagagtgagactctgtctcaaaaaaaaaaaaaaaagaattggtaatttctagatgggtaccttgatgggtctcagaaagagcaaaacccactagcaagaaatgaaagaacatttcttaggctaaaatcctcaaggaagtctacataaatgattgtatgtgctatgttcagcccagcaatatctcatataccacgtatcattgaagaatgacattccatttaggtgaagtgtccagatactgaaatatccacctttaaagttcttaaaagagaactttaaagagttccaagagttcttttttaaaggatttctgataaagaacattctaaatcatgtgctgcacttccctgtctttttaaaacctacattgagaggagtcaactttttctcaatgattcaggcttttaattctaagcttcacttttgtgacagcagccagtattgccataattggaacaggcagattaagatttgaatttttattgaccttttaaacttcccaggcctcagtttcctcatctgcaaagctgtcataataataaatatcttgcaagattgctctgcctttttatgtagatgcccaataagttagcaactgtgttagcatcattggactttgtcaggggacagtttgggactattttctatcaatcctcctgctttcacacatcctgttacgagtatgcctgtctcctgtagccttcccattctgacttgtttttgcttttttatggggttatcaattttgcttcaggagcccttgctgtctcttgggaagtttgagttctgggacctaagctttgctcaagccagtgcaatcccaaggccagcatttccagttggcttcagccagccaagcttgcagcagagttaggactggggagtgatccccaagtgacaaagcgtaagagcaacagaggatggagttctcaacatcagtgtagctgctcacaatctttttttctgaactcccccacaccgttatattctgcatatttaaggttttggatatttgcctctaagtgtcctagataaacaaggtgctcttgtgtttatttacagccagaggggccctctatatcttagaagatatgtctgtttctcccaaagtaagagatgatatcttagaaaggtagcagtttcccagttgataacctgatcatagtaaacagagagatcagaccagaccttagtcatctggcccctccccattcagccagcagtgtttccctgtgctcagtaaacaccctcgattccctgcaaacaaccaagcatagtcttgcatctgcatgagccccctgagttcccagggctccagccctcctttccctccctccacagtgtccagctgcaagctcccatcttcctcccctgagtttccttgcttcctgcagttcccttttatcaccctttcctctgaactcccagagcacttgatgttgcctgagtcccttgctttttgttcatatgtggtcatcttgagttctcagcaagtaaattctacaagggcacaaagcatgtacttcatatctaaactcccatggcgcctagtctaggagggtgctaggcaggtgtgtgcaggtgatttcgtgatattttttacattggaaatgccaggcaataggtcagcatgagctgaatctgtgttggaaggcagacagatctgtgttccctatttgtccctctgggaatatgacataatcttagggggtaggacacaggccaagaatgtcactaactgatttgggacatgagtctctcaccaacaaaatggtaatagaccattcattcattcatcaggaaatagctattaaacacctactatgtgctaagcacgttggtattattgggaatacagtgatgaataaatcatattcttttccctaaagtcactgttactctttccattttacagatgaagaaacttgggctcaaagaagttaagcaactggcccaaggttctactcccataagtggcagagaagggttttgaagccagataccctagttttcaatctctgctttactcttgtgctgtctgcctccccggcatcatgcatttggcaggggacatgatatggacctgttacgtgggcccacagcatccaggtccagcctaagctgggaagatcaaggaaggctccctggaggaggtgacgcctatacgaattctaaagaatttggccaggcagcagggagtgtgtttggctggtgtcataggcagacagcagcatgcccaaagacaagaaggagggagggtttgatgccttcaggaaccaaaataattgaacatgcctgaacccaatttcttaaccagtgagcattgtaagggtagactaaaaggggctgtccttgtgacttgctgacacaaacccttttcccggtgaagaggtgcctgagcaatactatttaattgtatttcctggccagacaacttccaccatctccttaggagacagggtggtcaggaagcaggaaagactaagatgatggggactctctgctgtccccaccttccctgtccattgtagggtctctgcagcctcataccctatgtccagcgacctcccccaccccgccgccagtggaatgcctgaaagtggggtttggcctgggaaagtccaggtaacacttcagattaagctcctcttgtcaatttcctgctacacaagactttctgaatccaagtctctttcctatgaatagagggcgggaggccagattgcccagttggaggtgtggcttcagctggtctccgttgaagtctgaaaagccaacaaagcatagtgagaattctgtgtggttcaagagggtgccttgtgcttgttgaggagaggccgttggcttgatcactcacgacactattactgacgttattatttactgcctgcccaaccacagaaatattctgattcccctaaggagccagtgagcagtaataattttctgtattgcaacaatcctcctaatgacagaaacagatccacctccaggtacgtggtggacgaatgggagcagctggctgctggccccacacttaccaaccttgaccacagggtccacccagcaactccacctcacccatggatcagggggaaaaacaactcacagactgttctcctcttaccaaggttaaaacgcagctggaattactttgggcagtttgtttttaaaaatgagtgttgcaattgtaactgtctcaatgcaagcttcgctgtagatgcccttcttaacaatatgctttatcttctgactgagaaaatcacttgagatgttatcatgcacaatcccacttgttctgcctctccaccctggcaccttctccgaacccagagatcccagagggccagcatctcaccccatgtaactccatgtaattctcccatctaattacaccggctgagagtctgtcttaagaaattcagtgggagctccaggtgtggaggggataaagaagagatggaaatataccaagtgaaaacatcagatttttctaaaaagggatttgtgtattttcctggagtcatgagtcctatagaaaaaaatttatattctttttgttttgtcctttttactggcaagggatttaagcctttggattaagagaaactcaaaagataatttaattccattcttatacttctgcctggataaataattccagaaaaaaaaaaaaaagatatcagctgcccttgtctttccttccagaaaagagcttctgtaatcgtccttcattatgggacatcgtgcctcacaactcatctcagttgattgcagagtagatggttgtatttaatttacataatcaaaatttttttcctagaaggagaatccctgaaaaatgttagctgggtcaaaataaaattttctaaaaagaagaaggaaaaggaaaaggagaaagaaatgtgagttgggcttaggtttgggagggcagcagaaaagcatgactttttttatgcctcttttcgagctttgtagccaagcatcttggcagtctctaatatttttctactttttcccactggggactcaactgtatgtttgtgggtcacgtggaggaactctcaaaattagacaacaatagcaaacatttattgaactcttgccagacatcaggtcctaccctaagttttctatgtttaaccgccacagctggtactggtactactattatcccatttaacagatgtagatactgaggccctgagagatcacacagatagtaatcgtggggctgggtttgaagccaggcagcccaaagctgcctttgtatacctgtgtcaatctgcttggagctgtcatctgctgtcccagtgcttaggtatttggggcctctctgatttctttagatatccttgacaagccttttcttttccttttctctttttattccttttctttgcctcttcctgccatgcagtcacctccggatgccagcggggcagtcaaggagagagatctctttctgtgtctttaaatacaagccagaggcctctcagtccatcgtctctctctgcctccctgtcacctacctcctactcccccaatccccccacagccccgctcaccatcctcttcaaattccctgccatcctcaccaccaccttcactctccatctggagtccaaagatgtgagggccagtaatagagtgtcagcggaagtaattgattcctcacaccgagagaattcgcctgcctttagtgtcaatggagctgaaccagagtcttggagggtgagcgagacatgtaaacagtccgtggccgagctgtcaggacgaagccagacacaccggagagtgaacgaggggggaaatggtggaacaaataattgttttattggaaaggaaaggaataaataatatttcagcccaggaactggcagtttgaaagagatggttgagagcttggagcagaaggattcgtgatgcaggttttaatggaagagattttctttgtctcaaagtaggaggtttcgtccccacccgacccccctctcccattatcatcattattatcattaaaataattactgtaacaattacagttgatgagacctcaggtttatacagcacctttcatctaaaagttcaaagcgatttatctatgtgtcatcttttgagagtggtaggagggtaagaaactattattttggggggtcatctgctgggaaactgaggtccaagcagatacaagatttagtccaagcctcagggcaggctgctgggttaaatggtggggtactgagttatcttcttgggggccttttctgctgtactcttcactgcctgggcctttatacacacgtggctcttgaagctcatccccggcactgatgcctcctcccacactgccagggcctccactggtcgctacaatattgtggccaaccagccagaagctctgtgcgcaaaacaaacagcctgcttctggctgtgagatgaataaagatccttcaaggtctgactcacacagctcccatcctgcttagagacttcctgtaatctggttccctttcttgtagaagctcatgtcctttctaaacatctttcttcatggtcttatgaggctctagccaggagcacccaacattcctaaatgcttgcttcttccacccccaacaaaccccaacctgttctctcagaatggaaagggcatttctgggatggggagagaaggtgaatgctttaacatgcctcacatggcccgggctgcctgtgcagcatgatgcttcagaatgcagctgtcgaaagcatagtcacaaacggaagcggttccagctgactggcccctgagtgctagattcagaatctccgccctggcgtggcagcagccctttcctgcttggacattagtgcaggcccatcatttccacaccatggtgttttttgcacagtagtgacaagtttgcccctggagccaggagaagctccaagctctgtaatctgaagctccaagtaaatgaactctaaaagggaggcccatcacacctgccacctactcccaaactgtcccctacttggatttctgcatggcacgtttttcagatgagttttgcatcttccaagttttgttagggaggctggatgccagcaaagaggaatagaaaaatgatatggagcctaaatccctggaaaaacaaaaaggacttttctgttgctgtggtggattccctggtgcccagtacacttccgttcccagcaggctcccgttttttggacagacggggaagttatgatttgccctcacaattggatcccctgggagccagaattagtgtgaacacctattccggagggaactgttcaccctgccgagtaaaggggcactgccagcacaccaggggccccagacgctgtgctctgattgcccttcagtgaccacccatgcaggcagccccaccgggcacaaaggcatgattcctgttcccttttgtcaaatgaggccaactgaggcacacaagcatgattgatccaggccagcgtaggaaaatttagtaagtcctggccctgctgggattcacctttacacctgctagtgctgctgctgccgctgagaaaaacagaaatggaaagaaattgtggactactcttcctttgcactctggtatcattccagaatgctaccaaggggccctttaagttgactgcagagggtgaggattttatagacacagagcagaccaacgaaagacccaacactcatgctgaaagcagcctgcccccaaagccttaaacttcacattggcaccggttgcctagaaaaccattccttacataagcaaacatgtttcatccaagtggcctccagtgtgtgtgctggtccagaagcagagcagacccgtgaccacacggcctcaggaatgcgccttgctggccagccaggtcagcgagggaaatggtattcacccaaaggaccagtgcagaagttggggaggctttgttgcgtgcccttaattctctgaaagttcaccttcagagagacttatcagatgcgttgtctggagtggcctccttcctcacgtcaggaggcattcttggcagcctgctccatgaggaacaatgagattggcggggccctcaccatcatcgcagggcctttgcggaaaaagagccagcaattataaatagatgttatttgtcgtttccattttcttgccttcaaggttttttggaataattccttcagtttgttttgggttattctctccgtgtacttcctttggtgggtggtcagacttcctcctttctgaagagccatggtgaccctggttgtgaggggattgtggataagaagctcaaaatatcagcgatttgtggtgggaagaaatgaaggaagaaaatacaactgcaaacagccactattaaaaaggcgcttggtactgatgcagatacccaaacaaatacagagtttggtaactgtttgagcccttggcgttaaatagcaaacaagaataacagcagcagtaacaacaaatggctattcatggagcatgtactgtgtgccatacactgtgctgacccattgatatgcattaactcaccagcctcttgggagcttgagcaccttgctatctaagacagcagatggaggacgggtggttttgaacatagcctgggctcagaaacacaagtttgaaataaaatctcgaaaactcaagtgtctgaaacactgttgatggatttgtgcagggggatgattttttagaaacccagccccaagaagcagggtattgagactgcctctaactgtgcttttcgtttcatcttctcctgtctggctcccaaggtgtcatgtgtgtgtaactcttctcttctccacatccaccatcctgttttgttttatgctggtaataataaaaatagccaggggctctcaggtgcttccttaaggcatctggcactgtgctgggcctgcatgtaccttcgcaatcctgccaccacccgcaaaggtggagactgttattatgtccattttgtagatgatgaaactgaaactcagagaggttaaataccttgtctgtaatcacaccatgagcaagtgccagaaagtaactgggtctgtccacaaagcccacatgctacacttcccaggttacacaacaccctcttaggtatgtttccgttaacagtaatttaacgtttcttttgtcacagaccttttccctagaaaaatgtgcctactcacaaacacaaaatttcggcaaacaaagatagagcttccccaacccacttacacttgtgtgtaggccctaggagaaatccccgcatttaagaatatgtgctctagatgataacttaagagcttataaatatatgggatgctgctttctcactccatgggccatatgttcacatatggatatatatgtgcttataaaaatactccacttacaaaaattaatatgttatcccatctgaactcttacaagctagatttctgctgggtgagtcttgaaatcatggattccaaatccgctcacttttcctgttggtgatttgtctattaattttggtaagtccttcagccttgtttaaacagaacaactcaaaagagcaagattctgttaagtctcttacatatcttacacccattttgtggaaacctaactgaggccctaaggattctttacacctggtacctgctaatgctattgtgctatggcaatccggtattttcattgccctcagatcttcctcccacaaggagacaaagggaggaagggaaggtctctgtgccctggagtttgactacttgggttcaatgcctgtctctgacctttcctcctcatgtaaccttgggcaggtcacttaactgctctgagcctcgatgtctgcatctgcaaatggatggtaattgtaacagggcctggtttggatgaaatgaggattaaatgaaataatatctgaatcaatggcctggcccatagtaaatgctcaataaaatgtgaacagtttgcagatataccagctttttagtaaatgggtggtacagatgcaaggcagaaattcaaggaaatgaaatttactttaaaaagtctgacctgacagtgagctgacttctccataaaggctaggtgactgtactgagcctaaggagcaggtggcctggcttcaggcctgaaccgaccagagacctcagcattgtgcagatctgccttgcagcctttttagacatcgtgcagcttctttgttgggaagttgtatgtgacagtgctgttttttttcctcctaatttcctcacaggttttaatgtaaggattaataagacagtgtttgtagatgtctttgagcctcctggaagaaaggcactccaggaggtgataaattctctggcctggataatctactcatgaaatatggaactttgaaagtgtgagaaaaatctcaaatcactttgacagcattttaattatagttgatttgtttgccgctaatagtgaaaatgctgtcagcatgatttgagatgtttcttccactcaaaatgttatatttcatgtttttgagtcacaaggcaacattttggttttcagatacaaccagaatagctcagtaaatgtgttggggcacaaagacagagagtataaaatggatcaaactccacggaaagcatcatcgtagcacgcattcttctcaacatggaacaccagcctgaagtcccttattcatttacatttatttactcaacaaaaagtgaatgagacctcctacatgccaggcaccagggaagtgtcgtaaattcagcagtgaagaggcaaggtccttgccttcatggtgcttattgtctggtgcaggagacagatcataaacaaataggtatattgacaagacctttccagattataatcatagctatgaaagaagtaagatgatggtgagatagagaataagggcatgccatctgaaatagggtggtgacagcaggcttctctgtggaggtaacatttgtccttaagcctgaaggatgagcaacaaccagccctggaaagcaccaatgaggagtactgcaggcagaggaaagagcgcttgcaaaggccctggggttggaaagagctcaccatatacaaaatgtcttcaacatcttatgatcttatgatgagcagtgtgaaaggaggccttgcttggttggcaaaggttatgatgtcaggacttgggcagagatgttctgatacgtagacccaaaagaaggggcagagtattcttcctccgaagacctaagtactctatcttcgatacagaaatccccttccaagtggttctgtgtggcatccctaaagctggattctgacaagggccagacatttcggtgccctgagagaaggacctaagcttggtgaatcttccagcacaggctccgttgactaacccagcctttggtgccctgctgggaagtgtcaagcgtggagacagttatggaaactagaaagccctttttcatgtttgcctagtgatgagaggaagagatgagattgttgctttttcatatctctcccgtggactcttaaaattaacttcactgtcaaaatttcccatggcccaaatgtaggtttggggagagaaatgtaagactttgaagttgagaaagaaagtagagaaagcattctctagacaaatgctcaccatgcagacttcagaatctgtgaggagacaaataaaaaggcactcggggaaccgttttagagagaaaataaagaactgggagtagagatggctacttcagctcaggaaaaaaataaataaaacaatacaaggtagtgttaaagctttgaaaggaatttttcgtttaggagagattatggataatgaaatgcaaacactctagttaatatgtctgttagctggtttatgttgccttctggaaaacgagtgatacgttctaagaggagcagcttttcaagttatcctacttgactatcgttggggtgagctctgagtctgtaccccggattcctttaccaaacactggatattagacactagatgcaaagccgtatttattccaaagccagaaacttcctaagcctctgcctaactcttcacaaatgaacctgacaacactgaaatttctaaggagatttactccagctgtagcaaatccctcataataaaaaatttccccaaatgagtcagtcacacaggaggtaaatgagacattctgtatgaagtcagcatgtcatttggagtgtgccctttatataaaaggcccagccagaagaccatgtggttaagtggggcttgtccacagggcagaaccagaagactggaagttggggggatttcagctgccgaactgtaactctgtgtcacttcccctcaagcaaaccttatagaaaaatctagtttttctaagaagttcaagtaaggtttgttgattatttgcttcacaaaaggattcagcagaggggtcctttaactaacaagctcagagaaaaaatttatagtatgattgaattatatgaagctttttcaaaaatgcatcccttctctatatgtgtgttagatacataaggatgtatttgttgcaggcagcattacaagaagggatttggggtggtctgtatccgttgagtaaattgaggcaagcttgtaacagtggcatttgttgggcagccctgcttcattgctgattctgttaatcccctaaatgactccatgggtgattaggcaaccagataaaaccctctcacttctgatgaacaagccagtgggatggcagggcctctctttgtccttcctagagaaattggcaacacaaagactggaactatctggtgaagctttaaaaaaaaagtttaaaaaattatttattgaatgtgggtcatgtccttggcactgttccagatgtcccgacctactgtgtctcatttattcctcactccagttctgtgacatggatgatgatggtgatgatgatgaacttccttctacatctgctaaatcatgacagctggattcttttacaaagaagagagaaaaaattaccaattatcctaccacccatgtctgtcgccattgttcatattttagtagtctttcagacttcctctgtatgtttatgtgaggaaatgtatgtataccttttaaaacatacttttaaaaaatctcctttttaaaaagttaacagtatagcgtgaacatttttccataaaaacaaaaaattctagacctgcagactattgattgtagcaggagagtattccattttataaatatcccagatggattcaccctccctctacggttgggctttgaaaccatttataagcaaaatatcctcccactttttatattttttcaaaatatatgcacaaagatgcatatgcatctttgcacaattgtctgattattttcttaggaaaaattcctagcagtaggattgctggattaaaggctatgtacatattaacttctgtcacatttcaccaaaatgcctttcagaatgtttgaacagatttccattcccgctgatactacacctctgctcatttgttccatttctgaaaacagggtcgcttctgctctgtggctcagcctccttgcctgtgaaatgggtgtgaaaatacaacaaatcacagttcacatttacttagcactcactgagtgccagactatggactaacactttagatagattagattttgtcatttaagtcccacatcaaccctaggagaagactgtaatatccctactttactctttttctccccatttctgaggctcagaaaggttcagtaacttgcctgaggtcacccagctaaaaagtggccaagctggggtgcaagcccagctctgtctgcttctgggattgggactcttgcgctctgggccatgcatttcttagtccagatgagttgtctgattaatgaacatgggtagcagagcctctcaacctttgtgcacattgccagggcatcaccattgctcacaggaatgtgtctgtccagcagtgcttgccttagtgtgaaaatagcacggaggggttttctggaaggtttgggagtttcccctgagaacaaatgaagcgtctttttacttttgttttggaaatgaggaagcatgttttcaaagtcagcaccatctcccacactgaaaccacagacctaaacagattccccaacctcacggtcttctcaatctgtgaccatctctccatttctccctgggggttgaaactgccattttgacttctccagactctaaggagcttcagcggttctttttggactgtgggagtccagccctgtggggtctaagaatgaattaatcctggcccactccttagacttcctttacaggcctattatttgaaagtggctaagtaacatagctcctgggggctgaagtgaggcctcaggcctccccagctcacaccagccactccttccggcagccggcaaccccagatccttgtatgtgacaggatcctttggcaggcacatcccacagaagggtgcattcccagccctctccttacccgcaaggaagagatttcttaagtgttgctttaacaggttgatgcaaaataaataaacagaaagggagggagagggagatggatggttttcagtaaataatggtgcagcggccagcagttggaagggagctggtgggaggaagtttcccacctaagcagttgtgacaggagtattaactgggagcccaaaagcagcacaaacgcagcacagtgaggactgccagagcacataccggggctggaaaatgtgtgtctgtcaagataaaatggtgcattatgtttgcaccttcccatgaacggagccaagggtatctttgaggtgcctgcttcccagccctggccagtttgactctgcttcaaatgagcacaggcctccacttcaggagggcagcctgccctgcctctcactgaggctaatagttgtgtgcacgtagacagtgggcccctggagactcacccctgcttttggagaaaggtttttatcgccttatctaacatgaggctgattccttttaagaacacatgttgactagacactgctgatgggaacctcgcagagtcatcttagggaggcggtggcccacgggtggggagtctttgtcactaacaattaaagaagggatggcccaggggaaaattgaaacagggggctggagggagatgggaaaataaacaaatgtctctgaaacatcccccgtgtgcctggcacagtgcctagccccttacatatatattttttttcattctatcttctccccagccttgtggagtggatatttttatcctcatcttacagatgaagaaattgatgctcaaaggggttcagcagcttgcaatgtcacagagctaagaaggagagactaagattctgagagagcataatggaaataaaaatggtgctattgaaggaagaaaaaaatgtgttttgtgatatttgatagaacgatgctcctgctcttacgtgggcaagagataaggccttccagccatgtgtttattcactctgtggctttcacaaagcacaacgacctgcagtatctctgtttgccagtctgtacaagcagacataagtgcccttcgcttatccatctgaaacaccttaacttctgcaaatgaatagagagacataagtgggagcgacacagtggtccttctcatgtccttcgagtgatcttttcttgtctgtgccatccccacccaggtatgactttatcgagattcgggatggggacagtgaatccgcagacctcctgggcaaacactgtgggaacatcgccccgcccaccatcatctcctcgggctccatgctctacatcaagttcacctccgactacgcccggcagggggcaggcttctctctgcgctacgagatcttcaagacaggtcagtgtggtcacacgtaggggccgggagatgggcgtcttagagaagaaggagggacagcacccagtgggctgaggcactgggtaagggtgacagtgtcatccagcttgagcatggtgagaggttcaaggtgaacccacaaacatcatgagaagaagagccagctcagattatccaccagcttaagggggcgggctgtgggcgggggggtgggggtggggtcaaaacagccattgtttgtggtattagacaaacagaaaaacacttcttgaaagaattggatttttgtatgttttttaaaatcaaaataatcttcatgggaaaaagcaaaactctgatgactttctcacgattacttcatggtctaatgatgtctttatttggaactacatggggctgaggacataatcttttcattgtttggagtctctaaagatcttgccatgacctcccaaatggggtcacaccatagcttttaaattaaaataaggttcctagaaattccccttggcagtccatgttaccacctctgtccattgaacccctactctctaaatgccaatgaacttgactccctgaaaagcaatcaaaaaatagcagaaaaagagtcagagggcactgcacttgctttaagttgactgcttgatttccatcaggtcccccttagattactttagggcctgagaatatgggccagtgctcatttccaaaactaaatacagcagacttttattcacaagaccccgcttcatcagctacactcaagctctcccagtggtgtgtcctcttctgtgatgtgtggagcttgttatctcgaggctaagggaagcatgtcctccagtcctccccacccaccacccactcccttcctcagaggctccccttccatctatgtgtgtgtctcccctctccccccagcagcccaagttttacaactcgtggatggagtctggttcgaggggaggttgtcagccttgtcatcaagaggcccaagaccggcgcctgttgagttcagtgtgaggggaactattcatatatattttctttttcactaaacagctcttgaaaggaagtggtagctgctgaaagcactttttatatccactctgtctaaatatttgtcggatttgtctgcccgagaacaagaacgtggaatcaaatgaaggggtggggcaaggggactgtgtcatgcaagagtggcagcccaggctgctgcagggcacaggtcccaagaaggtttctctgccttgggttttcatgctcctgactatgatgaggtcacaggggctgacaatctgtgtgtccagtggctcaagctgttgtgaggcccctgaatagcttgatccatattcccctgagtcttgtgcaaaattcagatcaatgccaccagcaccagtggagcatcctctgctgccgagcagtggggagaataaaagagaaagaaataaaaggggatgcttgctctcttcgggttggagaggcaggtgtgcaaaccctttgcacgtaacagattcgcaggtgatgttattggatgagtatgtatgtaaattgaaaggaaaactatgatatgaggcagaatgaataagtgcaaagtaaaggtacaattgacatgtggtggttatgaaaatgggggagcagtcaagtggcttagcaatcgaggggctccagagaatctattcaatagcaaggtccctagtgctaatgctgccactcggctgcactgtgctggccatgaaaggaaaacagctccaagcaagatcttccaggaagctggccaagggaagtcagaacaagggtgagcagggccatgaaaactcagccttggtctcacaccacccaacttagtatttcacaaggcatcatgctacattctccagaaagccacaggaaaagtcaatgttcactctatccatcatgcaaatttgaaaggaggatattaaaagataaaacatgtaagagggtatcataattcaatatcgctgtcttgaggacatgctgaagcaggatttcaaatgaagcaacaagtctgtgaactgcctagaaacaatggtgccagccaacggagctaggtggcttcagcttggagaaatggggtggcctgctttaaggattggggttgcctagtgaagagattgtaagagaaagccctgccaacaacagccacactcctggcaatgtaagagagcagatgagagcccatagacttctcagggccactcgtacctgccgtcatacccacctgctgctggaagagcaactgtccgcatgacagtcagtcttatatatgccgggcgcagtggctcacacctgtaatcccagcactttgggaggttgtggcaggcggatcacctgaggtcaggagtttgacaccagcctggccaacatggcgaaacctggtctctactgaaaatacaaaacttagccgggcatggtggcacgtgcctgtaatcccagctacttgggaggctgaggcaggagaatcacttgaacccagaaggaggaggtggcagtgagccgagatcatgccattgcactccagcctggacgacaagagcgaaattccatctcaaaaaaaaaaaaaagtcaaccttgtataaagtgcagaaatgtgcaagggagcaaaattcaaaacagagaagtttagaaaaatgagcattcatgcaggtgccttgtcctatacccacatttccattgttggagtcaggagagaaaatatacaaagtttacgtcatccacagaacatgaaagaaatgggtggacatgctgaagaaatccaaacaaacacagctatgtttgctagtcggattcatagagaggaagaagcgggggaaactgtaaacacagatacgcaaatagccatacagagggctctagaagccttcgatggtacattaccctggtgaggctctgctgtaggacccacagtgtgagtgcagaccagggcatgtggctggcgtggaaggttcatgtctgccctaagtgaagtggtgtataaaagattctatatgttaccagactgtctacatttaaaagggtaagccagaacaacttacatacttaaaagatctcaaatcaagataccatgagcagaacagaaacaaaaaaaaaaaaaaggaatttttaaacgtaaaatgtcacattgaaaacaaaatcagtggaaaatgtgtgtgtgtgtgtgtttggttttttccagaagctcctttaaccataagttcaagattaggttttctttcctgtttgcctgtgacacttcagaaactgacatttttggggtcattcacagaggtagagaaaactcggagtgcctactgcctccacttcctgaattcaggaactgaattcaccttctgcggggaaggcaaactcagctttgggtaaatccactgtgttttaaatgtcttgatacctatagattcttctacttgcagagttattgtaaaattcacagcggaaaaacagagtggacatttttcatagcagagtcttttcctatgaaatcattcgctgcaacccaaatcccccagcttctgtagacaatcttagccttgagtgggcttgagtatttgttgacttgagttcttcgtttaacctttaaaccttctaacacatctcagaaaaggatcttggataaggcagatgtctgcaagagccagccagcttctgcctccttttctgagatctcttcctggcatctgctattcagctgcttttgtgatgctgcaaacagtgagatggtacgattagagatgaatgcatgatgttaacagacaggttttatttttctgcataaaaatagataaaactggacaaaagtttttccaccgccttcaaaataagccaaaggatatacccatttatagccatatatcagaaatgcttttttctttctttttttttttttttttttttgccttaagtacctaaggttgaagtttcttttcagtcaaatgcaggagctcaggaccctgggaactatggatactttcaaatttcacattctccaagcctctcttagactcactagatgtccatcgtggaagcacttgtgccctaccaatgacaggaaccaaagaaagattccgccagaaaattccccactcccaggggggtggacattccccttgccttctaagggaatgacaatagagcaagctctaagagggcatgtcaggatgctctttctagctctcaagcaagaagtgaatagagagttaatttcctcacaaccatgtgtgaggctcagctgagtggcccgcatgaagaatgctgcacagcagccataaactctaaccttttcaaaattcctcttggccccctgaagacccgccagctggcttggctttgctgaattgcctcatcccgggccattgaggaggccctcaggagtccgaagcccaatcataaacaaagctgggggaggcagccccagctcatccctccaggactagctgcccattgaaaactcggcctgacctgctgctgccatgcatatgaatgatggggtgcagagcctctgagattcgctgcttagagcctccacagaacccatgcaaaggttagcccttgccctcgtgtgttcctagtccctaccctgccaaagcacagcacaaggtggaaagtaggaagtgatggatggataggtaggagatactggaattttctgtctggtgctgaagaaagttgcaactcctccatccgcatttatttgcatggcacttcttccaaatcagacatttgcctctttccagaatgctgtcatcaataaagagactcaatgagaggccccctacaggagctgcggataaaggcatcgctgcaggctcagatcagtgtattgacatcacctagttatatttcagtgtgagccccagaggacacttcctgacagtaaacacccagtttatcgagtatttctggttggttgtgttttttatgcttagagtgtctattatcctcctcaaaaatcctgcttccttttcttcttttaaaatctgaacataacgagtgaaatcaattctaattgtccagcactttcattcattgcgtgaatgtgcatgagctcgtgcttcgtgggtccatgggtctgggttgcagtgctcccgggacccatctgtggtgctgccctggcaaatggtggctggttaaagcacaaggacccttttaatatgactccacctagaggcattaagagatagggtggctgtaatcctcttatgagctcctgttcctgctcctgctgccatccaagctcgcaccaggatgcgaatgtgtgccgcatttaatcaggatgcctccatgcgtcccaagaaagcagacgcaagagctcaggagagaaacaaggccatccacaccacaaaggagccagaagccttccaaatgtcaatgcactgctgcatttttccaaacttgttgccggagcggcctttaacatccccaacggcctgctgtgatccaccagctaaaaacatcgattgttaattgtccgaccactacagagcagctcgttttaatatagtcatgacatgaatgagacccaagctcccctttgcccctcccctgaggcaccttggatcttggagggagaagggggcacttcgttggctgtggtacaataggggctagtgttgaggtcagcaacaaataaggggtaacattgttttccctgctggcaatcagcaaggcttccttaaggattgaaataacttacatttctggagtgagcagctgagtaattgagaaagaagactctgttcctcttttcaagagaatccctctctctctctctctctctctctcatacacacacacacacacacacacacacacacacacacacacttctctgtacctccaccccactccccaattcctcaattgctgctctcactctaataattatgtagagcaagccagctgtgcctccctaatttatgagggcttgaaacgtgcatgtgaagagtatgttgcttcaagggccactccagtagcaacaaaaacctcaagagcagggggatttggggccaaacatttaaataacccatgtgacagaggccacaaagaaaggcatcttcttcttagtgctacagttctcttttacatacaggctctgaagattgctcaaaaaacttcacaagccccaacgggaccatcgaatctcctgggtttcctgagaagtatccacacaacttggactgcacctttaccatcctggccaaacccaagatggagatcatcctgcagttcctgatctttgacctggagcatgaccctttgcaggtgggagagggggactgcaagtacgattggctggacatctgggatggcattccacatggtgagtgatgtcatgaggcattcctcagtagcttggcctttgcctgttaattgctttagtgatgataaagaggaagaacaaagacttcaaagctcctatgagttcttatatgacccatggtgactttctcttcttccccttcactaaggatagcttgagagaaattacaggaaggctgtctactttcttggaaatatttctttagaaaaggataggagactaaatagatacttggaaaggatgagaaaacttaaagtgttcatttctactccaaattgtcaggatagaaggtggctcagtggctaacccctgtgacaaaacagaaggactccagagccagactggccgggcttaactcccggctctgctactccccagctgtgcaaccttagacaaatcccttaccctatctgtgccttatctgtgttaagttagctgctatcatcatcattattactataattttaaaattgtcattaatatagtcataaatattgaaaaggtacatcacccaaggctaacagccaccagtacttcgcaggtgaagaccaacatggatcttgggtctaattagtattggagaggaacaaatctttcacttttgtagtcattgtaagttttttctaatataaaggagacttgatgactaagcaaaaagagcaatttcatttcctgggtaaatcacaagacttagtcagaaaacttgggttgtaggcccagctctgctatttcctagcagtaagaataaagaaatcacatgcgctctccaaacttcagtttcttcctctgtagaacagacattgtaatgatacctttccagctcatcttccaggccactgagaacagaatgaagccagtgaaagtggcctgtacctttttaatgaaaaagtgaaagtgctttttgatgtgcaggaaaaatattagccattgttcttgaaacatatctttggtttttatggcaagatgtacaaagtgtgctccactgaatgaaatgcaatgaggggaagggaaaacggagtgaaaaccaagtttgacattttgatttccactgacttctctttgtcttgaatgtccagttggccccctgattggcaagtactgtgggaccaaaacaccctctgaacttcgttcatcgacggggatcctctccctgacctttcacacggacatggcggtggccaaggatggcttctctgcgcgttactacctggtccaccaagagccactagagagtgagttggccgattgggaacctctgtcctgtccttccgtcagggctgtgagggtgtacaggtgaaggggggctgagctcttatgagggaggagatgggaactctacggaatttatggtggcatctgagtttagaggtgcccacatcctcttgccaggaagaggttgatgagaaaagaacacatttcaatctgggtgcttctttctttaaaaaatatatatatgtgtgtaacaagaattagttattttcagggaaagtcatggtaccatctcatacctcagtttcctcatctatgaatgaaagagaggctagttaggatgatctatacagggcccctcctgtgctaacatttttttagtctgtggccatttttttccctctcaaaatctcaggggcaattgtcacaaaagtgaaccattttaaacctctctttctctggattttttgacattaaccatctctgggcctgggtaatgttttcctgactagattggtacaactgcttagacttggacttcacccttccaccaaagatagtttgtggagcttctagtatgtgccaggcaccaagcaaggaattaaaaactatcactctgatcacagctgctgtgggacctgcagtccctcagcactgagcaacatcttcaaatcagctgctcttggacatgtgtttcaaatatgctgccatttctacttaaaaacccaaacgataacttttttttttttttttttttttttttgagacagagtctctctctgttgcccaggctggagtgcagtggctcaatctcactcttcccagtgcaacctccacctcccgggtttaagcaattctcgtgtctcagcctcccgagtagctggaactacaggcatgcgccaccatgcccagctaatttttgtatttttagcagaggtggggtttcaccatgttggctagactggtctcgaactcctgccctcaagtgatctgcctgccttggcctccccaaatgctgggattataggtgtgagccaccatgtccagccccacataactttaaagactgaagaagcacttttaagaaagattcaagctgtggaaatcctaccctgattgcagacaactcaccatatatataactacagacacggcagcctggcctgcaggaaggttgctgggttttgcatttgttttttcatcaaagagcttctgaagattgagtgacaaagaaacagtatggcaaattgcaccaggtcccgtgaatggtcagtgcagtcacagagtaaagaataggttgatacctgataaggattgctggccgatcttagacacatgcacacacacatatcgatcagtgttgatggcattcatagaaggacagcaatgcaactgacagcacagggccagagtaagtgacttctgggtctatttgtccagacaggtggtgcgggggaatagagagtgacatgcatgtgctcatggagagatttcccaaagacaagtatttatgctttgtaatgtctgtcttctgtgccagaactcacaagacagttgagtgaaaaaagaaagaagcaaaagtgcctcctgggtgtttattaataaagcaggcttcccacgatgtatgagctcacccaaatcgccacgagtctatctcacatttacctgtattgcagtaatggtgcatctggcatctgtagcctgcagcaataacagttcttgtgctttagattgtatttttaatctgtatgatgattctcttatttatccatagcctgatttcttttaggtcccatttagtttctctcagacccagaggggttgtcaagctccatgacttgatgtagttgtttttaaaatgtgagcatataattagggtcttttaaatgaggaagtgcctgcaaggacttgtccctagaagggaggcagcatttgggggatcccgaggtatgaggttggaaggcctaactgcatttgaccgtctgctttccccagactttcagtgcaatgttcctctgggcatggagtctggccggattgctaatgaacagatcagtgcctcatctacctactctgatgggaggtggacccctcaacaaagccggctccatggtgatgacaatggctggacccccaacttggattccaacaaggagtatctccaggtacttgtgcagataccagaggatgtgagagtgtgtatgtattgctggggtaggagggtagctcctcaaatacagtaggcagaggacacaaagaaaataaacacagcatacctgagaactccattcattcattcatccaaacagatgtgtatgccaggcactgggttacatgctggcatacactgatcagagggagcctgcccctgcccttgtggggattactgggcctggggagaagttgtttggccaggatgctgtttgccctatcactatagatatccaaggaacattatataagctgtttggatcttcctcattcttggcacagggaggcatcagggacatggggggcattctcctaaggggaggtttgttgaggtgctagctgcacatgacagcttctcatgatctttgctattggagagagccctgccaggaaggttttgcacagagctatcagaagaacacataggaaaatgtcactaccaggaacagaactcaaggtgccccagatgctcggcagcatctcttcagaccattgtttgctttattctgaataaaccttgcagctcatgttgagtaatcttcccgcactgcacactgctccaattctcatcccctgggaagaagtaaacagggggaaagcaagctactagttccacaccagagcagtgactgcttttatgacacacgtaagacagccttgtgacccactgacaagcctgtcctagctctgaggcgacacagtgacctctgctctaagaaggatattgcaaagcagacaacaggaaagggagaaacaccacttagaaactccagggagtccacagaggttctaacagtaagccctggggccatttgtcattgtctcttctctctgcctctccaaaaatccatctcctcgcagcctgcaaaacttccagaaagttctgtataactggcatcccctatctttgaccttaatcatatactttcgcctattgctatccacctgtttctcatacgtgtagacagcactatgtactacttattcaaatgtttagtaatgctgagcacattgtaggtcaccaataagtgcttactgaattgaatttagccagtgtgtgctagctacattttggtcatatggagactgccattaagaaacaccatggccatcaaaggaatgacatccagcaatttccaaatgggtttggcattgtgggaggggaagtaccttaaaatgttggccatcctcctcatagagcaaaaggtcaggactcggtgcataagcctaattgcttgggcagactctacatgccctttgaccccttagtgacctgagcaactaaatacacaatggagcgagagggtgtggggaggggatgcctctatgagtgtgacttttggaactagggcattataagtgagttggattgaactggacaggagtagagtggagtagattcaaccttgtttctttaaagcagcatctgcttccacagtccaaggcaggccatcatttactaagaagggattatagctctagatgttcaatgattgagaaaaatcgagtattgtcccttcatatttgcaaaagagagaaaaaagaaaaataacctaacttttcaaggtgtctgatttagtgtaagataatgtgagtttaatcgtccaatggaattgcaaactgatactaattacaagtatgtctcagtgaatcacagatacaggttggaagcaaagtctaatgattgtgtcctttggaaaaaaacaagacactgccctgtgttgggaatggtggtctcttactccagccctctattccccaggtggacctgcgctttttaaccatgctcacggccatcgcaacacagggagcgatttccagggaaacacagaatggctactatgtcaaatcctacaagctggaagtcagcactaatggagaggactggatggtgtaccggcatggcaaaaaccacaaggtaaatccatgatcctaccttaaaggcacattggaccagggcaggagggatgggatcaggggagctttaagccgacctcctacaggagagagggccttgtgtagtcaggctcagataattgatggaggcaagggtcgtgctggccttgaaaatcttctctcttaggctaaagcgattggaaaacaccgtttctctgacagccagttgctgttgcatcttgcgcagcagagagagagagcttgcagagtgttctctgacttcaaatgaaggagaaaatatgtccccagtccacttctccccacccaggattcactgaacatttatggcctgagtcccttccacatgctgggttaacaatcacaaaaccacatgatactatagttcaggagttaccgagctctggaaatgaaagggcacaaatcctgagagggaatcacaatgtcctggagaagaaaaaggacaataaataatgaggagaaattcagtttgttggggatgggctctgaactggcaatcatgcttagcggcgaggcattgaattctctctgctggtgcctcccgcatctgcggctcccggaggtgtggtctgtgtgggtgatgtggggcttttgttgtatacatatggatgaatgtctggcactccactttcttaagacatgacattctgggtctgcagctggcacaggcgatgtgctggctctatgtgtatatacacagcacactcagcccatgggggcttattgcaaacagccaggggcttgtgtgggtaggattggggtatctgtgatgggaacacagggcacgatgccccctgcagagcaggagctggtgcagaggtctggaaggagagtgtgatgtctgggggattcctaggggctgcctgtccttccctaaaaaggaggtagggagggaggaagagggtctctcctgtagcattacagttccaccaagccctggtctgtcagagtgtgaattatcaaaatggggcacatgtggccaagcctagggaggccaaagatcttttccaaagggaatctcctcagcccctgtcactgccccgaggcagcttgctctgactggtgcagctggaaacctcagacccagaaaattctgaactgtgatgttggcagtctcacttgggaaacgggaaaaggagtagatttttaaaaaatcaaaatcaccatagtaacggggtaccactcatctgaaaaccatggcttctggatattaccaggtatctcacacacatgcacacaattgcccgatttccacgataaggaaagtgaggtacttagcaattgaaagatgtgccaggccaggtctggtttcccactgacttggtttcagaaagacttaccaagcatccgttgggaatgcccagcctgaattggcactgggtgccaggagcttgggggctgagacctggttccaccccacccttttcaattataaaccggtagatctcggaagctcagctagcagacgagggccagaagccaggcaggggtggtccccggggagaggagtggggctcacctgattgtctccctgtccaggcgcaatgactaagcagcacaggcccagagggatactgtagcataagctgttttaaaagcatgcagatggaccaggatgctatttaaaacatcatttgtaggaaatctgcttttggaaataccttagcactgcacattttcatagaatgctgtcctccctggctttatccctggtattcattcttcaggaaagatattcctgaaattgaatttagctttctggttttcagaattatttttctcaactttttcataatggatatattctctctcttttgcctcctctttccccacttggctagatttagttccccagcagccaaggggtaacttgagagtttttttgtttttgtttttgtttttgttttactgaattagtcgtgcccaaataaatggagttggggcagaggaaaagcccattctcttccccattagaaattcatcctttgtgtacttagaaggaggcaggaaaatggagagcctgccaattaggcatcgccccactctccaagctccttcaccccactgcgggtgtggtggacgcccaggggctttccttgtctcccctgcaaggatggtctcagctgccccttcattagcagatctttcgttcagatatctgtatttaatgtgcagattccccctcattcacggtgcgtcagcgcagctctctgggctgttggggttgaagtagttgagtgaaccgtgccaaatagatttgtcaagtctgccgcagtttgatttgatgccatggggggaggtgggggttggggagggacttgggggcagtggaggaagaggcttcgtccatgccgagtgccaccactgagtttctctttgtagctgctggatggtgggcactgtgccaagctaactggtgctaagtggtgggcttgaaagtgaaattcagacaacaggagttagcagaaaagcaaagcagagatgaaggcaaccgcctgctctgctctgctctgctcagagcagagggaaggtttgcaaatgccttcccggtgtgcagggaaggaagagggaatagtgacatttgggacagaaatgtgggaactcgatttcaactccctggtcactgtcaacagcaatgcagcataccaaagaccagggaattggggaagtcagagaaaaacaagtttaatgagtgctcaaggtggcgggggagggctgtcctatgtctttgcaaaacactgtttacaatgtggacccagacggggctgaggcaaggcctaggcctctgaaagaatgccttcctttttactgccagtgggtgagaaagactaaggaactcttttccagcctcccctagccaggcagcagcctgttcttggtctcttcccatccaacaggtcatcatgaggtcgcctatgagaaagtggtcagtcacactgttgctggggcattgcaagcctcctcctggcaaacgcagcctggttacacaggccacatgcacagcacatcccaaatctttatccaattccacatgccataaatatggaacctatgattctcatacagggtgggcccgccttatgtatatttatggcataaccacaaggcagagagctcatctgcctgatggaatccatatccaacccacgtgctcctttagattatacaaattgctttgcatacatttcttcagaaaccacaagcagaaattactgcttttggtttccccagctatattaataacaccctagatgcagacatggcattgttaatacaacagtagaaggttcatgtatgtttacataattataggcacaattatgtacatacataccaagaagggcgcatggagagcaatgggaagagctcagaggcacaaggtcttggtctagttcctgccctcctgagatgctgattccatgattctgcactggggataggctgtgcctcgggaatggaaccacagctggtgacaggacacgggggagagagactactgcccttatttgtctaggcaaaagcccttatcttcagttccctctcattcggtaaacgtggggatctcccttgttgacacagctctagttagtcacagtgtttctgggctattctgatgcatttggaagaaatttgggctaaaagagaaagtctgtggggtgccaaatgcacgctattggccagatcgaggatggatgggtgaagatagggatgaggtaagacttgggtccaagaattttcagaattaccccaccaggagtggaaggaatgcactgagttcatcacattaatgtaaggatgacctccaagggactcagaaaatcctcaggcaccagcttattcactagagtatttcacagagtttcacaactgtggaattgaagctcttagagattaagtgccttgctgcagggactaggaaactggagcctgcatggacggcgcctggtcaccagacttggatgtccagactggcgctctccacaatccgccctaggccttactcttcatcttgagggaaattggcttcctacatgttcagtccaaggactgagaggtacacattttcctggaaagcctcctcttcagtgaagttctgcatgcaggatgagcctgtacatggcttaacccactaggctcattattgtggagctgggcttcaccacagaatcatgaggatggagagttgaaaggagttgccatttgtttgatttggccacatcccttcaaaacaaataaacactccacttcaaaaatcctctatcccatatttattttctaaattaaaacaaatcatttttaaatcagagacttgggaggagagaaagagtggtgtcagaaaaccaaaccctcaaatcagttggctaacagctagaggcacgtgatgtctattttcagatcttcttaaacagggcaccgtgtgatcttggaaacatctcttagtggctgcacgcctcagcgtttccacccagtccaaatggaatggcgctgcggctgctatcggcaaagcaccttgagatctgtagatggaaggctctccgcggatataattaatggagtagacccacaaagctcttcttgagcagaagcaagttatcaatttaaaaagtaagaaggccccatgggatatttatgggcctcttttaaaatcataggcctggaatggaccatgataagtcatccagacctttccctgcatctgatggggcctgcattgagctgcctcagataaatgtcatccatcccagcctcactgttctcttagggatgcaattatgcttctacttgatcatttaagttttcaggaaaaaccttttttttaaaaaaacctcctggcagatgatgggcttccccttattccttttgtggtagtaattttgtttgttgaatatgagatgaggacaatacctcacactgtaatgggcaccagccttcagaagtcatgttgcgtgtgctctgaagggggctgataccccttccaagttcaagtccctcagtttatctgaccctctcaattataatggagaaggatccagtgccctaggtaattaagtttgtcccttatccatttgccatgggatgagctcagacctttagcctctccacttaggaagctcaggggaaaatttcattatacagaagcttgaaccttttctctatcaggctcccgcggccagcgtcacccagctcccgtgggtgctgaactgtctccagtagctgaggcgcgcctccctggcgctgatagccttgatgttaaactccaaggccccggctgtgcacagaggccagtgacaaggagcacacagaggggatgtggaagggcgctgtgattctgcttgggctgtggaatcatgttccttgccccaaccccaactaatgtagatgagcactggagtgaagccctcacctggtagattgtcctgctctctgatgtcaccttgtccctgctccggtttgcagagcctccacctgaagaggcaggcaggtggcagaggtctctggaacctcactccctgttccctcaatctctccccacctgggagttaaaggcacctccttaagaaaacccaaacatctgtgttaggaggtttccaggggtggagggcccaccccacccagctagaatgtcctagaatgtccgagtttctccttccctcttcctaggacattgactgttccccccaagcccgctcattgctctgatcctgtgctcctcccccgcctgctcttctccagccccacccctgagctgccctcctccccgctcctccctgatgcgttcctgtctcaaatcctgaaaccctaatcctgttagtatgctgtgttccaggcctcagcgtctcgatgggggtaacataatcccgcagtaaatctagcgggccccgcaggcccacacagatggggatgcgcacatccccgccccccagaacgcagccgcccctgtgcctctgtctcctccttcatgtaggaaagctgcctgatgacaaaaacagcccgaaagtaaaggaggatgagagcagaggtcatcagagtcctaaatgtgcatttggttgttagacagcttctttgcctaccggcatccctaccttctcttaatctctctctgtgtttatatatatatatatatacatatatctatgtaaagtatacacgtgcacacacacacacacacatgcctctaactctatatctggctaagttcccacatccactagaatgaaacaagctttaaaacaagtttttaaattgtctttaaaggggagttttaaaggagaaagatcaggaccatgattcacaaacaacaaaaaaagcccattgccttcatatcatttcccaccgcccccccccaccccgcatcgcaacagttccctccccctacttgactgttttgtgcaacaaattaattaaacaggatggcattcattgattagcaatttatttttacgtgtagacccaatggctggtttcagagcagatgcaagggaagggggtgggagagggaggacacacagatctgcagtcagggtgagcggatgagtcagcacatttgttcctgacactagttttaaaaacatgcttctggcttcccccagcctctgtcctgcattcctgccacttttctcttctgcctgctttgttttcccccttcttgagtgtctgtgccaagtacattgaaagggagaactttggaggcaatgaaacatttattagtggagagaaatatttattttaaaaaagaagaggaacatctcgtgcacaatgtctaccccagggctccagcactgcgctgtcttggaaatatttccctgctttctttgcagtccctggagctggctgacttcagatatttacagcaaaatagaagtaaacagtagttcacaccataggtaatgaagagatgggagtgtgcaagctgagtgctgaagcgctactcacatgagaggtggtgcacgtgaagagagactgtttttgtaccccaaagggcccgcctcatttgggaagggtgaaacagccagccgtgtctctcctccaaggagctcaaagacttggacagaatcttcatcttaggccccagaggcaggcatgatgacaggtagcatctacactgtcctgggcacatgggtattgatagcaaagatgaatggtatataagaaaaggctttaggctgggcagaaaaattcctctgcctagaggcctagaaggtaggaaggctgcaaagctcactgtcctcagctatgtcagtcactgcatattcttcaaagacaacttaaggaggggtcagcaaagaagaggtgactgtgactagaaatggggtgggaagcagagaaaatgttctgagatggcctcagaaaccatcagtaatgcgttctggctggatgcttcttattagattttatatatatatataattatatatataatgtatattatagaatatattctatataatatatagaatgaatatattctataatatatattacattgaattatattgtccatgccttgtggactcacaggaatggtcaaaatgcactgattttctttgcctgggagtgtagataacaaccaaactgggatgctggatagcagctgatttaattggcaggtcccccactcccctagaggtgcaaatcagaaaatccaggaaatgctgatggttttcaggttctgggctactgaaaacaaatcagaggtctcaagaatcaattgaaaaatgctggattatattcagaattcagagaggcacccaatagattatccagaccactttgtgccctgaatcgctttttaaacttggtttgcagagatgcacttgaagaaatctttatgttcaacttagctctttttaaatacgcacacacatatatttttaataattacaacataatcaacactagcatcagaaagctagggtcaccttgaacatacttgtgattttcctttgggtagtaaacaaccatactaagatctttcttttaaaacaaataaaaagtgggccaggcatggtggctcacacctgtaatcccagcactttgagaggtcaaggcaggtgtatcacttgaggtcaggagttcaagaccagcctggccaacgtggtgaaaccctgtctctactaaaaatataaaaattagccaggcttggtggcgcatacctgtaatcccagctactagggaggctgaggcaggagaattgcttgaaaccgggaggcagaggttgcagtgagccaagattgtgccactgcactccagcctgggtgacagagcaaaaccccatctcaaaaataaataaattaaattaaataaataaaaaatatatgtcctctgtgacatccagcttctaaagcagatgttaacattcctatctgagtataacatacaaggcaacccaccgatttttctcagatacctcactgcaaagttgtcatctgaaaattgttggcctgaaggtgggacttgggagtagtcgtggcttttggaacttaaactctcccacctgtgcaaagacccacttgttacttgtgacctggcttacacgctaacatttgtcctgggtgctatgcaagccttggagggagggccagtaaacttaagtgtctatctgcaagcctattatcgactttattttcctgaaggagaaaccaaggtatctaaggtttattgatttgcctataatgattcagtgagttgtcagggaatagggaataaaaccaatttcctggcgtcatttcccatgcacacaaccccttaccttgcaatgcctagactggaagccaagaatccatctcagtgaatttgatcagaaaacatatgaagggtgattctaaaaccacagaagcattgagaaagtcataaagatgtataatatatgatagcatttactagctataaataggggagatgcagggagaaaaatagagaccttgtaaaaccattgggtcaggataaatagaaactgcttaatatttcattaaaaatggattttcataaattgcactttgatatctttgggcaaaagacaatatgtaaggactaaggcgttgttattcattactctttgttattaataatttgaactggtattgaaccaacacatcaacaaggtatagtcgccctgtgaatggggcactccccatgtgttctgggcactattcaaagtgtataaaaagtccacagccaccgtctgcaaaagcacttaggctgtaagggacaacgggtaactaaagtgccctgttgcaaaatggacactgttagagcagttcaaaccacaaaaagtcatgcgaagaaaggtttagaagcaggggaccagagagaaccctacaaatcaactcatacaatcccctcatttaacagaggaggaaattggggcccgagggaggtagagatatttgcccacacttatgagctaattagccgcagagcacagctcctggcttctgattcagtagtgttttgtgtgtgtgtgttgtttttcccactataccacactcagagtgagaggtgtgttaaaaaatctaataagatggtgttccttcaccatccaaagaacagaaggcagatgtgaacacaaagtcaagagcagacaagaaaacagttcaggaactaggcttggaaacgtgaagggtaatttgaagctaagttgaaaagatccttcatttgattcaagggtgggagaagagtgggcaaaatgaaagggcagactgaagttcaattgaagcagtcaggtagatggcctaggggacacaaactgtgtgcttgcctcccttcctgagtggtgctactgtaagcagagattagggggttcacccagagcctgtggccacatgtatccatgggaagactgaccccctccctcagctcatacatgcgagtgcgtgcagcccatgcccatgtgagccacactcatgcacacaccgccatcccaaagacagtccaaatacacaatcatttactcattgaggaaagaaaaggtctcttagcgttgcctgccaaggctgagaaatgcaggggtcggataagataaaattggatattaacaacacataagacatgctgtgtttctaaacggtaccagcgtggtgtgtatgctgtggattagcggcagtgttaaagttcagatccactcaactttccaattatgcattcacgtgacaagtaaagcttttttcacccaatgtgaactccttagcgtctcctgatggcgaccacacacacagtccccatcaccatcttcagagagcaagccagtggaggcccccctgctgctgctcacaacacccatccgaaataagcaaagtgctgcatttgcttcttcctttccaaaacaaaacaaagcaaagcaaaacaaaacaaaacagaaagcctctgcctcatgctgaattctcagagaactgatgaatctcttttctttggatccagttccccatccctttcctgagagctgtggagccctttttcagtacgaaggaagtagggtcagtcaccactccccttgggccttctccagggtgtctggccctaaccttctttccttccctttgcttggcttttctccttccctcgctaacttggtcttctcactccttctcatccacaatcgctatacaggaagcagcaaaatcaaacctgggagagaggcatgactaacaagttctttcccggtgctccctgctgtcaaccttaggacccgggtgggaggacttcccaggggaggagagggagcagcaggctgggtgcgcagggggcacccccagatttggtggacttcgcaccagatcaatggtttaaactgaatatggtggaccagcgaaaatctgcttccctgtttgtcttcagccagccacttcccttcatttacttgcaaaaggtatggtgtcttcagtggtgtgttattaaatggctctaacttttaaccttagcaagcaggaaatagggctgttaaatgatggagttcacagttcatggggaagaaaggactgtgttgtcaattggctgtagacttctgtgctgctctttgccattactcaaagccattctaaggtgggattataaactcacactggaaacacatcactggacagtgactctacctccattcagcccatgcctggagactttaagggccccatgactcccagccaccagcataaacactgcaaatgtgttagaagaaactacaagcttaaaacctaaaaacttggcaaggatgttggatccagacaggcatctctgagcctcagtttccttatccaatgaagtggagataagaatatctaccttctggggtactatagatataattgtttatactcaaagatattttgttgcatctggctgaaaagtcttcaaatataccagtttccccagttctcttgtcccagccctgttggtgcccccaaacacttggcatggtctgaatatcaggagccgaaacatctagttctcctaagcaggagaagtcgctgatggttgcagagttggctgtaagtagatttacagagtcccttggttgttacagctatgacagaaatgatttagaagtgatggttggttagttggtttttccctctacccttattcaggaaaaccaagggaaactcacatatactttgctctagttacttttttttttttttttttttgagcagagagcacaaaaaagcataaggtccatatggcagttattgatctgggccatctggaaagccaggacttgctcccaccatgtaggatcagaagctgttccaaaaagccttccctcccataagagatgtattggtcagatggggacagggatggatttcattacagggcaggactacagtgagaggaagctggagcaggactctgaaggactgtctgcaaccctgaccctgccacaaagatcagagagaaccaagaaagtgttgattgacacagggccattgtaggtagagggtgcccctcatcatcttgtccgctcatgggtgggatggcatcaagtaactaacaaaaacaaccgtgaagcactttgcaattagaaaatgctctgcaaatattcctaggtgcctgcaacatgaggaagagggagtgtcaagttcaagctagtgagtgaggtctggtagccctaaaagatgatatttttacttcattttaaacagatattctacttttctctttcttccttagcttctcaagtgttttccttcttctgcctgctctcagcctggaggcaaaattttccttccctctaaaagtttctgggaagaccactgataattttcaagtagaacagtgtgagaaattaattttttttacagtgtttctttaaaaagcccaaaacaacatacccactgattatttttaagcttgagggaaagaaaatttgacagaactttcccatccccttcaaagactgctcaagtggctgaactacaaacaggggtttcaataacatggttttgcatcttacgctacaggtatttcaagccaacaacgatgcaactgaggtggttctgaacaagctccacgctccactgctgacaaggtttgttagaatccgccctcagacctggcactcaggtatcgccctccggctggagctcttcggctgccgggtcacaggtgaggtgggggctccaatgaggttggggtgctgattgagccctaggctctgctccctttcaactctctgcaaacagcatgactgcaccacatgaccttcccagaaagactggctcaaggactcaagtcctaccagagtttgtcttttcattcattcattcagtatacatttattaagcatctacgatttctattaatagctaacatttatggaatgctaactaggtacagatgccattctaagcacctaagatgtaacatattttattatcctcataaggactccatgggtattattctcctcactttacagatgaggaaaccaagacttaaagagctaggtcactcaccagtaagtggtagagccatggtttgaatctaggcagttccagtccaaagcccttgctttcaaataacactctctgctgcctcaaccgggggccaagagctgtgcatggtgctgtggacacaaaggtgggcacaacagactgttctgtgtgggcatatggacaagttgggcagacatactgataaactcataaataaatataaaatcaaaactatgatcaatgtctggacatagaggcttatggtccttggaagtacatcgtaggggatttgacccagcctaggagctcaaggaagacttctttgaggaggtgatgattgaggtgaggttagaaggcaaataacagacattacctggtgaagaagggagggaaggtgcaccaggcaatggtcacagctttctcaatggcacggtggcaagagggaccaaaagaggaagtgaggagcatggacacagcttgtgggctgaaacccaaggcatgtagattggagaagaccagagtgggagttgggacattataggaggcaatgcagggggtgcagatgggagatgatgatggctggattagccccagaaatttatggacagaccaatcccctttatcttgtgggctcagcccagggcaggcaagttgcctctttgacctggaagtgtcttcagtgtacatccatccacgtgcctttcccctaatcattccagctctgacagggagtgctccaaggtctgaccctgtttgaggtttctagttaaaacaccttgtgtttgtacagtctctgcatctccacatgcctttcttgtttatcatcttgcctacactttctaacaaccctgtgaggtaaggtgggccagggactgataaggaaaccaagactcaaagaggctaaatagcttgcccaaagtcattcaactaggaggtgacagagccaggatctgaacccacgttttctcaattcaaattctctgctcttaccacatttacacaaagacccattttcttctaatgggatcagtttatgctaatcctgtctaggggactattttctgtcccttccctgttgctgttccaggataatcagcaaagatttaggtagaggtcattctctggaagattgaaaggagagaaccagtgattttgaagaaggggaacaacgtggaggatcttttttatccatagctcagtttgcaagtatgaaatgcacattgactatagaccctgccttgcctgacatcatttattcatgcattctccactcaatcatttgttccacacatctgatgtgccaggcacacactgggaatgggacatagagacaggaacaaaatagatggggtctctgacatcgtagaactttcaggctactgagcaagatagataataaacaaatgcaagtactggataaactagaatgtgcacatgaaggaaaagaacagggtgctctgagggaaaccaatttagtgaggattgaaaatttgggaacagcttttctgtggatatgacacttgagcttgggggtaagaaaatgttagtctgggggtgactgaagggaaaagcatttggggtaatgggaacagcatgtgggaaggatccaaggcagtaaagagcagttatttgggaagtaaagacctgatactgatgccaggaaggtttccttctacttggcaaaacaattactaggaaataattcaatgtttagctcagttcccctgttctcagtgtccctgatagggtcagtggggactagtgtcatcgacagggatgtgcagacacacattctgagagtccttggttagagctgtaagcacaaatagttaatggccattggatacttaaatatgccaggcaccatcctgtgagctcttagtaactaacagaatccttgcaacagccctcaagaggtaggcacctctattagctcccctttagatctaaggaaactgaggcaaagagcaattaaataatttgcccaaggccctctgactagtaagtggcagagtgaacatgaacacaggcagtctagctctgagtccaggctcttaaccacagtgctgtacacattcaccatgcaaagaaattagtgctgacttagtatttgacagttgggctcttttgcagctcccttcttatagcgggtggtccctggttagcaggtgtcagccatgacctcttgtatcttcctctcctctctgcagatgctccctgctccaacatgctggggatgctctcaggcctcattgcagactcccagatctccgcctcttccacccaggaatacctctggagccccagtgcagcccgcctggttagcagccgctcgggctggttccctcgaatccctcaggcccagcccggtgaggagtggcttcaggtagatctgggaacacccaagacagtgaaaggtgtcatcatccagggagcccgcggaggagacagtatcactgctgtggaagccagagcatttgtgcgcaagttcaaagtctcctacagcctaaacggcaaggactgggaatacattcaggaccccaggacccagcagccaaaggtaggctgttcttggaggcctctgtaacgttaccctcaacagggaggctaagtgtggtacagggagttgagactgatgatgtcccatctaaacagtcgtcatccaactcctgaaatccaataaaacaaatatcgtttgagagattactttgtgccaggcactgtgctaaataccttatttctgactcttttgtttgtttgtttgtttgtttttgagatggagtctctgtcacccaggctggagtgcagtggcctgttctcggctcactgcaacctccgcctccagggttcaagcgattctccagcctcagcctcctgagtggctgggattacaggtgcccgccaccacacctagctaatttttgtatttctggtagagatggggtttcaccgtattggtcaggctggtctcgaactcctgacctcaagtgatccacttgccttggcctctcaaagtgctgggattataggcatgaaccaccgcgcccggcctggactcttttttaatcgttacaacatctgtgcaaagtagatctttttgtcactcccattttagagatgataaactgacacttgatatcatgcccagggtcacacagttcacctgtgatagagccgattcagaaaccggaagtctgactccaaagtccagatgcctaacccctactgaacactgcctttttataaagttcaacactctttatacactctttcagataaagtttccttgaaattggccagacatctaaaggggatgtggtttttggaggccaagctatagaaactagaggatgacttccaaaaataacgatgtttttctgaatgtcgctgcattcctttgtattctcctagttttgactgcttagatctttccggcctctcagactgaggcaagggagaagcaagagaaactcaccccgagccagaagctcaggccagtacagcttactcccctgccaccagagtgaaggtcagccttcaacacagacacaaggagccccagaaggggaggagacgtcatacctctgtccctccccagatcagtctcctggcaggccaggctctctgattcttatctctagttaccccttgtttttctcaaaagaacaggtccctaaaaaaggagggagtttgcatgtctcggggccacctttgctaagcaaatgtctccattctgaatacagaggcaagagttgggttggaggttttgcgatgctgaggtaaactcccagctctcaactccagaggcttagaaaggctcagggcttggtaactggaaccttgcatcgatggagcagaagttggaccgcaggcttccccatggagagctgagcctggtttttcttgggaaagaagttgatctttgccattgtgggagacagccctatccgagacagtgcttctggttcagaattgtggacgcagggcatcctgaaaactggagcggtcctgctgaatttctgggggctaatcagctgcaggccctggccacccactcctgtccttcccccggatgagtgtctccaagtgtactctaggctggtcctccaaagcagccccctgctccccgcatcatcagttttatgtactggggctccatgtgaggtttcttttgacaggagtgctttccctaaacaaaggtttgggaaacagtctaagactatcgatgtgtgaccagaagacagtgtcattggcctaggggtcattttcccgtaaggttctcagtgagctaggaactatcagtcagcttgggttacctcaatggaggctttcacacattagaaaaagaagtgttcctttccctgtagaccaggaattcagaacggtcaaagatcgcccaaactgccttcccccctctctagccaaagtcagctgaaaacgcagttggagccaaattcttccccagatactccattttagtcaccaggtaaaagacacaacctggaaattgccacctttgtttacttcctattttccataattctgggtccataaccaccttccaaatgaataaaatccttggtctgaaaatgaagctcgcgtggatcagaatgtcccagtgaccaggaatcaactaggaagctgccttcctagcaggacgtgcggggcagggaggagaaggggaaggaaagggaagaaggtgatagggactgggtcccacaccagaagggctgagtggcctctctccctgcagctgttcgaagggaacatgcactatgacacccctgacatccgaaggtttgaccccattccggcacagtatgtgcgggtatacccggagaggtggtcgccggcggggattgggatgcggctggaggtgctgggctgtgactggacaggtaagatgacatttcctcctctttgcatctcacccacatggtcctctgaccctggcatcccacgaggccctgggagggctgtggagggggcagccatcccaggagctggaaatgctgcagacccctgccatgttctcctgcctcagaccacgggtactgcagcctctggacttgggacagtttctcaagggatgtactttgtcttttttaagggatcatttcagttctccaacccgagtctctcaaaaacaaatcataaccacacaccacccacccaaattcaattagaccctggctcttcaggccagagggctgtggctgttgatttagggaagaaaaaaacccctcatgataataaagtaatcggtttatgtctgaatctggcctccagatgtcagtggctaagagacttcattttcatttcggagccacatctgtaaaaggcatttatttgctcaggagggaccctgttgcagggagctgatgggggcaggactccttctcattgtcctgctcattcctgccaggtggcccaggccttggggaacacctctcatcattccaaatgagggtgaggcccacggagggtgcccagccttcctggtttccgagggagggccctgcccttctgagtcaggccctaccttcctttccttgggtcgccagccctcctccctcagcagagctggcaccagatcttacccagagctcactcactgcctgccaaaaggagtttgtgggagccactggggctcagggactgagcctgatgccagcaggagcagccaccagcctgagctatcctgccctcctccgccagagccccaggtatccccattttcctgtctgtgccgtacctgtcacgggctcagccggcaggatggcatgagggattaataagggcatgtcggagaagtgcttttggctcccagggagaaaaatgctgcctgtatgctggctacagcagcgcagaggagccctgttgaggcacacgggctgggaattgggcccaaattagcctcctcacttttgaattgaaggcagccccagcgaacacatcttcataggaagacacttaactccccattacctggggatgaggccaaagttccctgcagcctgctaaacgtgtgtcacccgtcctctcacaggtgcagaaaacctccccccgatacaagctggcttcatttatgtgccctggaatcaggggctcagcgctgtaggggatccaggagcttgtaagccagtggctttcacacacttctgcccatgatacacaatttaaaataattttccttcacaacccgcttcacttataagcactcacacacagtggtgtatacggggtacagtgtatgggtaagtgcttggactctggagacagattgccaagttcaagtcctgcccctgccattggctggctgcataacctcagaaaagttagtctctcagcgccttggttatcttagctgaaaaatggagaggacaatagtctgtctaccccatagggtcattgtgaggattaaatgaatgaatggatgtgaaatacttagactactgcctgcacccagcaaacctgttatgataaataactgtaactgaaacaaaaggttcccaaagcaatggtcatcttaaccatggaagtgcactccaaaatattatagtcggtatgttttaaaagctggtcatgacctattcgacggattccacaacccaatgatgagagtgatgcgtggtttgggaaatatcacagacctgggccaattcctctttcatagacaaggaaacagccccagaaggtagaagtcacttgccagaggtcactcagctggatgaagtccacctcattcttccccccatcccttgcccttcagtgccatgccctcccagtctggccagtgggacagttgctaatgacctctttccttcattgctccccaatcccaacatgccccaaattacactggtgatggtcagtgacaggtttcttatttcaaagccctgcctggccattccttggaagatcagagttgaggagcgttcccctctgcccagcctcctttcctttgaagtctctgacatctggtttcaatttcaggggtagcgttgctgtttgatgggcagttaccttggagcacccagtacaaacatagtacaaacagtataaacaccgaggcctcggtgcccgccgttcctccactttcatttacacgccctgccctccggtgcctcattggcccctgggtttaacattctttacaccaatcagctgacccattttgctacctaacatttccagaaactgttctccataggtcacgtggctatgtttgcttttcgaatttccatctgtttctcacactcatcttcggttcacttcttcatccctatcccaaaggataacaggaaaaataatgggctgggctgagctgctgcagctaaatactttgacagggctgcttcacctgttagttggtttgtgtttcaaataattatgttttgccttactgccccatagtttgctttacaatcgagtttctatgacacagtgacaaacttgaacttacaaattaggacacttcgaggttatttgctatttactgtgagcaaaaggcagacacagcaaagggaagtatgaaaggttatgtgcgtagtatttaatagcagaaaggtgggaagccgaccgtgaaaaagctattcagcgtatttagcaatttcctccagctcctggctttattaaatggtatcctgaagggtgcctgacaaaggcgcctaatcacatacagtagtgcaaaggagcatgtatagaaatgagagggacaaggcactggcatcctgttggaggacagctctgggatgaagacaccaccccaaaacacatggacttgagcaccagtttccagaacccctttcaccccacccagggcctgactcatagctccattcactccctcaatagttgctgaatgaatgacgggcatgagcaaataagcaaatgaataggtgaatgaatcacctagagctgaggtcaaaaccccctgcctgcagccaggtttggcctagccagggttcattgtgtgctacttagtataacatttttaataagttgccaacatgtagagtctggagattttacttagggatttttgctttcttgttgggggaaggaaagggggaaagatttggaagacctggcctggccacactgggccacctcccctccaggccccagtctgctggagccagtcatggaggccacctttaaaccaggcatgtaagatcccagctttcaccacctcctctctctccaaccttcccctgccctcacaaccacgtctgctttcctcacttacagtaggtgtttggatccaggaaacacttgaacttgccacaccctgacctaaagacatagccccaaatcactttcaccatgtagggtctgagcctctttaaatccatattcccgtccatccagttttgtgcaaacatgagccagagtgtgctttggtccttccttggagtcagcgtcgcctgtagccccctccattattgtctcgtggccttttgtgctaaactcggggcctctgctgtggagtaaagaatgtgggtttgtgtccctacctctgtcactgctggttctgcaacccaggaccattctcattctactatggtgatgcccctgacttcgttgacagcacacagacatgacttcagagttccgtgcacatgtgtgcatcttctttcccttctctagagatgtttggcatcttcctcctgctgggttgcaacacaggctgctacagcattctcttatcttcctttgcccttacacagactccaagcccacggtagagacgctgggacccactgtgaagagcgaagagacaaccaccccctaccccaccgaagaggaggccacagagtgtggggagaactgcagctttgaggatggtaagcacaaattgcctccagatggcatgggtgcggactagtcagagtgggagctggcctgtggctggacagggacctagtggtcccccagatcagagatccaggggatctcaaagaagtggtaagagaggtgggggcacttaggggtttggggcagtggctgtttacaaccaatgtagaagcatttggatagtgtaacaaccagtacagccctactggtgtgaacccactagacatcaggtgagacaaggatgactccaaagagaactcctcttttgaggagtctcatttgttgagccctcactatcttgcttgtctgctaaaggagaaccattcttatccttagaattcacagctctgatagtttttcctgttaagctgtgtgtgtatgctacagcgaagtgaagatacggcagtcatctgggtgatggagcgcgatagttgggttaatccagcagttacctgtgacttaattgtgtttccctgtgtctttcaccgccaccaatttgagaaagtataacagtgatgattctataagatagtgcactgtatcctctataactggagtgcagatcagagacaaaggcggaaatgtaaaaaggcatcttcaaccgttccctcaaaactcaggggctccgcatttctggatgggtcccatcacatgggaaattcttttcatttatcttcggagtatatccaagttagataaaaacaataattggcagaatccaaaagtcagtcacattttaaatcatactgctaaagtcaccaagtatgaggacatttataagaaaccacaaattttggaacacctggcattttggctagaatgttaagcttgacagcctcaacttacagtaaattactgatcattattaaatgttcattaaacaaaatgagggaagattggcaaagagactagagaagtgatggagacataaagatataggtagatggcaaaatctgtggaacctgcaagcacagccgtttgacagttagaggaactacactgatggagtggatgactccagaaaatggctacaaagaagaatgggaggaaagccaagaataaatgctgaagttatgtgactgaaaaagcaataatttaatgcatatgctttggggattgtgctttcatattattgtgtgggtgggggacactgttggtcggggttagttgaatacagaattctgacattttaatgaacttgtttttgttttatggagagaagaaggagacttggagaatcttccaagacatgtttcagatagtttgagagccaaaagtggaatgcatagggagttaacatacgatattggatttacagagttagcttgttgggggacctggagtgggggttctagctaaatgacaatcaaaggaaaaattaagggttctgctgcaaaatttcagaagtttatttttaatatgattttcccgtttctagtggtttgtttcatttgaggtttctttgatggttcctcccttttctttttgcaaaagttttttttgtagaatttggttcctgagatacagtatacatgtaaacattacagaggatttatgctatattgaattacttcgtatttttgaagagaaaaatagaaattcagaaattgtcaggagaaggggtggtaaaggctaagggctgacttttccaagccacaggttgatgcttctgtaatagattccatgtgtctcttctaaactcaagctgactttggccaagggtgggcaaacattaaatatcctgtcctggaaagggaaggcatttacagggcctggtggcaatcttcctcctccctctgacgccagcagtgccctgccccccatgaggtgagccctcctcacccctagggtgagtaatttgtttctaccagtccgtggctccctttagacttcctaacctgcattctaagccttccccagggaaattcctctctaagaaccctgggaagggaagtgagaagggcagagaccccactttctccctgctaccaacattagccaacatttttccactgtctccgcaggcactgccggcaaacaaccaaatctgggttcccatttcctctttccccacgtccacaccacccccacttagtcacatatttggcattagctcatactggatttttggagctgggtggaacctcagaagaaactctcttggttctgtcttcaggctcaggcaggtgaaccatcaaagcagacaggacaccactgtgtcattagttcctggattcccatagggaaagcattctctacctcccggggtcgcagcctccagggattcagcatgatgggaaattatttttcctcctggccagcactgagctgagaagctggctggtctggtcccttcgatttgctcttaccatgccaaatttcccaccgggcatacctccccatggagatgctggactgtcccagtcttcagaaatagagacggatcacaaagaggtgaagtgtagcaaacaagccttccttgtttctgaggtcactttctcctcactgggcagaacctcccagggatttcagtctctctggatgctaatgggctgccccatctcctctgagagccaggttggcaggagatgagataatactttttttgggagccagccttccaccagggcactggggagacattcttctctggcatttagggaacagcaattttcacatttgtctgctctccgaggtggacagaagaggctgattagagcctgaagccatttggtagcctcattcataattgcttactatgggaaccactggcagacttggctttcatgcctgggaaggatgagaccaaagcctgacccgaaagccagcgatcgccaagatgagttaaatgaataagcaaaggaagccacttctttctctgctctccactcaggccttgccagccatttaaatagtaccactgtggctgttctctgaacccatttcatttgccttcctttgggttattgttttccccttttagacaaagatttgcagctcccttcgggattcaattgcaacttcgatttcctcgaggagccctgtggttggatgtatgaccatgccaagtggctccggaccacctgggccagcagctccagcccaaacgaccggacgtttccaggtaagccagctgtgagtgaagatatgaaagagttaaggccagcttgttccacatacttcaaccccagattcccttacaagcttcataacttcccaccgcacagcaatcctctattctttgcccacaaaccaccacagtctttgctcaagacgtcacctcaaagaatagccagttggtggttcccagcctctcttgtgattacagcacagcctggaagctgggagggagaagcggaagccaagatagaagaaagaggagaaagaaaaaagggacaattgggaggccctaggagatggggcacgagtcagtgtcctcttgttcccatagccagcacccactgctattatcacagagccccttgtcaacttcgagctgggtactgttcctaaaatggctcattgggagatgactggccttgagtttgatttatacgtctctgagggtgccactgcttctacaccaagtcaatttgagggaccaaaatgctgccacacccatgggtatctagcagagctgcctggcacttggcctctagaagagtattgctgtaagtcctggatacattgttaagcccaccattttagtttcagaaagccagatttcagaagcttctcctggcactgctgacaagaaggggttgcctctatcccttctaaacaggtagcaagagttgtctgctatctctgctgttacgtgctttcacagcagtatgatggtaaatgtttaacaataggctttttagggattaaaaaataaactgctttttaacgtttgtcactttcagtggtgtaaatacccttaccatagctgagcttaagctaccaacacaacatcaatggagatggagttgagaagtcagtaagagagcattatatagtttttttttccattgtgcaaatacagtagacagaaatgactccagaagtatagctactgataaaatgtattaagataactagcaagtgttgagttttgaggatttgttacctttgttttttaatacaatttattgaattatagctttatataatttaatttttactaatgaatacatttaacaactggcttgcaaaacacttgacaagcagctctcacaagctggtacaccttggatctagcacagcactgagtgactttgaattctcctgtacttctggcctggacctgagacctccataagcactggagaggagaggggtgaattccggaaatttagtagatcagtttgccagggtacaataggaaaaggctagaaaataaaagagggaaagggaccttcccttctgcaggcttccttagaactgcttctcaccccaagcactggcgtgtcccttcttcccggtgggggcagtgggacagatgctaggagaacacttggagctggcctcctgacacagtccacacttgcttccctggagggtcacagtgcctgatccggagaaaaacattttcatatttcaagtgtttatctcttcagcatttgagtgctcagagagattaatatctgaagatcaccacagcctcaggcaaaagaagagaacacttaccccagtccagccttaatcaccctcccttctctgttcactgcaataatgtttaattaatataatgagcctcctgcacgttgggaaaaaatacttatttttataacccagcctggatttttcatttcatttccactcctttgagactgcatccaattaattcatggttgttcccaacccccatgttttatctgaatgtaaagaaggtttgtggggtctgtgtaggtgtgggtattctagtgttaatgtgtgtgtgcatgagtgtgtttgtggtttctgtgcatgggtgtgtgtgtgtgtctgtgtggtatgtacctcagcagaggcgcttggaataaaaggatatagccggggtcctctgcaggctggggaggttggctggctcttattcagtgtctgtcctcaggttcattctaatgattctggcctcctcccttgactcttctaagcatattttctctgggagtgtctgagggcagccctacccaggccacaaggccaccaattactgagtcacagctccaggggagcttaagtgacctccctttgaccctggcctggacctctgtttcttcacccgttcaccaccgcctcctcctcgtccagtcctggccttcacccgaaagcccctatggttgacctttgctactggttgggaattctagtctttgtcctccttccagttgattcattataccctgtggtttgggagggcttttcagagcaagctcacaaagtgggcagaattccaacctttggctgaatggatggggacagagagaaaattacggccataaggaactgctaaatctaatgttgttcctcccttaagatattgaaagggaaagtaattattttcctattccagaggaatcccgaagtttgggaaagtggcacttataacctgcctccaggaaacaaaatcataatattgttctcagagcccttccctctatcctctgatgactttatgaaccgttctctgtatttcccattttccttctccctacagagcttgatattgggctttaagcaggagaggagagaaagccctttctgttcagggtggtccttacttcttctccatagggaaaaaaaaaaaaggagggggaggccctgaggggattggggagaagggaagcagctggcttggttgggggcagagcaactgctaatgggttcagagcggctggcgcccacagagtcagcctgaaagcctgttgtgtgccacactttgccatccacagaggggaccgtcccactcttcacgagcgtgtgccatatgcttcatcccctgatgagataggcaaacagaagtaatgaaatttaagaaaggaggtgtctctgtcaagtgtgaggggcgtcagggtgaagagaaaggtggatgggagaggagctagccgtgttgaagtacccaacacgggccctatgtggaaactgcttacattcctcggatattttctgatttcattattttctcatattttctttctttttttttcctttccttttccttttaagtaagcaattagttctgttctttttggccagtggttgcctaaggctgaaaagcacccactggtttcattccactgtttttgtttttcaagatagtctttcaagccagtcagaatttctgtttttagctctttgcttgtggcttagctgcctggagtgtgttcacaccagcctctggggaccctgttccaaattcagtgacccctgctagctgcggaggaacactcagtgttctctaagaggccactttggctttcctctgtagtgacaatgacataggaagcacccccttactaggagatggcatgtttcctacattctcaggtgctttgaacatagacagagttttgagaatgatcaaagcccagcctttaagaaccgagacaaaaactcatagggcgggcaggtatctaaagctgcagcattgaatattgtagccatgagccatgtgtggcaattttattttaattaattaaaatgattacagccaaaacttcggttctgctgtcccaccagccacattccaagggcacagtagctacactgtattggtcagtgcatagacagggcacgtcactgtatacacggcatcatcacagaatgtattggacaacactgctccagtgctttggacactcacatgagagcaaccaccaggggcccttgatgattctttagttccctggttttggtatgaaccaagaagcaagtaatggagggatgtgtcttctgtgggatcccttgatggagtgttcagtggctggtatctttatagctgtctcattctccctcactagataactacagtaaagtaagcaagtaacatggcattagatggtgtaggaactattgcgattaatcaaaaagagcattgtaagtaaatattaatactaagtaaggtcaataatcatcatcattgtgattgttgtgtcatttttattgtcaggaatgagacaaagaagatgaggtaaagggtactaggccaggtcagcttcagaatcctccagtgtgtgttccccctaaatctgtgctcttttattcgtgggttggccttgtgaaatctgattacagtattacttcaatgactttcaatcatgaaagtgatagaaagaaaacaagcgaagctgatattgaacagagctttgactgcctggtcaaagcctatgggattgagggaacagaacctttactctaggctcaaaaacaagctcaaatgggagtaagtcgagaatcttaatgttataaaatacccaaattttacaaacagtggctggctattccttcaaatgtaagaagtaagattgttaacacctcactggggctattttgatgcagactgagccattgaatgaattccgttagagtgggagaccttagccatgattcacggtggaggcgcacacaagaagattaagtgaagtgtggatgggtatggtgagtggatggttgcagagaaatcagaggaaataactgatgagtgaatttactcataatgggcttgattttagacagtgagcaagtggtgactgaattgaaaagcaactctgagttcaaaagatcaggtgggaccgatggcagcaaacaatccattgaattgctgttagattgaactgtcttcagaaagaggttgctgtggcttggctggggcacagacactgcaaatccagagacagaacttcctgggctctggaccatgatagataattaaagatcaggagcagcttggctaaaagaaagccaatagtcaaggaataatttcaactggaaaagaaaaggatagaggcccttctttaaggaaggtagaaaaacatcccaggctttgcagaaaaaaataacagcaggaagaagctttctttaccctttttttttttttcctgcaaatcatgattggttgagtcccccagcagtgtgtggattgataacgaaggggcagaatgacaagacagcctcaatggcaaaaccttcatgaaagccggcagagtgaaaaaacagctctgggtagattcctgcaagggctaggactgaaaccttcatgtccacaaaatggtctattgtaaaccttgagaacatcttgctaagtttatccaaagtcagtgtttcccttaactggttgctaatttgaggaccttagcagagataggcagaccttggaaggccagctgagggctgactcatgttttaagcatggactatgcaaagagactacatctcctacagcactaaatattctttcagatggtcgttctagtaggagggcaagatgctagccaggagatgtgcgtgttggacagatggtgtgtttggctttgtgatagccaggaggatcaagctggtgatttatttcagggtttggtgaggtgtagacacaactgattccattgctgttgggccagtcgcagtcacgtgttcacatgacacttaagcagctgaagccagatgcggccgtaaatcgccaggtgaaatatcaagagacctttccagagacagcagcaggttaaaatgctgaatggccctgtcctctgtacttcctcttcacccttttgaactcctgttgttcattcccaggcgattgttttccctgtatcattggcaacaacagatgttttgggtcaaggacccagcgaaatgcctcccaagtatgtcaggtccaggaggagaggaattgtatctctgggacattatttcttcaatctctttcagcaatggaacatatttcctttccattgtctttttcttggaagctgtccattgccggcatcatagccatcagctacaagaacaggcagggctggttcttagctggtcagttgtcacgttcaggcgacctcttgacaatccaaagggctttacctcaaggttcaagtaaataaaaaagtagccccccgcccccaccataccagctcttttgacggtccaagtaatcagtagccactgtatacctagaacatcttctgtgtctgacagtggtgggccataaatcgggagattccagaagaacaaacttcagttgcagcacgtgtttgatctcaatatctatgtgtgggtgccatgacttaaaagagctgaagcatttataatagcttggaagaagggtcagtggaaaaccaacactgccctagaaagtagacatttgaaccatgccctaggaagtagacatttgaaggggcaagggttcctagggaagcaaagactacgagtcttaattcttcacaagtgaaaatgtctctaagttggaaaacagaaattggctatgctccatcaggggtagaaggaggaaatgtctctaaatgacagcaggaaaactttaaactgaatttaagaagtttctgatggttagggttgtaacctagaaaacacactacagacgtggcctatggaaactccttctctggagaatttaaagcaaagggtggacagctgttcttggatgcttttggcacggttcctccgggaggcaggactggcctgccctaagatcacttgaggtcccactcttgttccaggatcatgtaatattttatttcatctactgtgaagcaacacaaaagacctgtggtgatggaaaacttggggccggctggtttctggagaaagagcagataaggggaaccagtctttgtccagagaacatctttactgccctcatgccaaacatacttctttttgagtcttggattggccttcctgggttattggtggtctttctatcctttttgtttcctagtaaaataaaggcaagcataggagggagtgtgtagagtgatattaatagtaacaacttttcctgagctcttaatgtgtccttgttactgtgcaaagcactttacatggctcattccatttactcttcccccaactctatgcagtaagactgtctttgtatccattttacagatggaaagactgaggctttaaaagcttagtgagttaggctgggagtccaatccagatgagaagctatgctgtggcaggtttactgagtccaatgaggattcaaatcctacgtcactccaattctctgagcctcagtttctttttggtgaaaatggagaagatggtatttattttgcagagctagatttcacagggaaggtgacatcaggggaggcaggtaaagcctcccgtgtgatcgcgcacaggcagcaggtgttcaatgtgttcattcctttccccctgctcttcttctcccttccttgggcttttcctggtctgagtcattccttcatgatgtccctggttctaatcaggcctctgtcagtgacaggcgctttgcagctcagcatctctctgactgatgtctactgctaattccttaaatttacatatcatctttcttccctggagctcatagcacttaacagacaagtggggcacaaatgatttaacgaagtgaaatccagaggcctgctcgtctggagattctgcagactagtggattagctcagatgtcagcactgaattatgatccttcagctgcttgtgctaagcatgtcactagcattaactccctggtcttgcaatgttcccctaaatcatgcatagagattgtcattttatcgtgagagggagatgggagagaaggagaaaggagagaagaggggaaggggctacctggtggggtgggtcactggaaggggcagactgtgaaacctttggcctggctgtgcctggagtttcagtaacaggaagggtaagtagaacagacccagatacaatccattcagcccagttcttcacacttccacacacatttcacttaccaaattctaaccatgatgccatgatttccctgccgcttaagaatgtaaattcacacaagtgacagtatctctgccaaacaattttcaggcagcaagtgggtcttatttgtgaaactgtgaaggaagaaggctgaataataaatctctaaaatctggtttcctttatatatgaggtggcaacagtaagggcttggaaattaccggaagcgtgggagcatttaaagggttctcactggtgtctcggtacactgggtgcttccacaagccaccttgtcattactggtgcacctcacctttgaaagtggctgttggcttgggagggtagagggaattgtgaagggattatatctaagggattatgagaagctagctgattctcctgtcctcatttccaatgtatagcctcatatcattctttaaccgtgtatttatcattctccattcatccattcattcatagaaacaaaattttcttgaggagtggcatatatatagcactatctaggggtagagagaagaagcaatgttaaaccttattatttgtaagaccagcatttacaatataactggggtgataaaaaagacatgaaaaaaccagttaaattataatgccaggcagtgagtgattacctgctgaaatccatggaaaatggcctgcctgaagtccttttaaaaacataaaatcagcagtacagtcagtaaatgctagagttgttgagaaaagaagcggattaatgttgcatgtgccagaatagttaggagaagaactagccaaagggacggggtagatggagtggttcagggagtggagaattacagctaagaggagaaaaagcagcaacgggcccagtggggaagccagtttgcctcaaacagagtgtgattgattgcaaggacttggggcaagctacctgcagagcagctgaaataaagaacttattgcatgaaggtggaaaacctgcagtcaggggtctcggctctgccattgaagttgcctctctaccttggacaaatcactttaacctttctgagcagtttcttcatcatgtgcaaagtaaggttagtaagtcctatctcacaaggatatagaaaggatgacatgaaatattgcatgtaaatgtgcttgtaacctgtaaagcattatgcaagaatgagctttaattattatcattaacagcagtaatagtaagatctgataggggaagcataggtttagaagatctttgagggtctgatttggcatcagtgtatcctccctcagcagacaccattattaattctcttctgtagacagctgccttttagttatctgtgctgattttggccttgcagaggtcacaccttgtagggtatgtagacagatgtggctttggatggttgaagaggcacaaactggaatcccatatacgcatactaaactggtctcatttgacttcagggaagcatagcttctgaagcactaatcccagagagcctaaacaggaaggagcttaggggagcagggaggtaggtgaggcagctggggagtcaagaaggaaagagctgtttctgggccactgatgggaggtccagcacaggctcagctctcacctagaaagttgaggtcagcaggattaacaacagcaaagcagtggtccagggagtattgcattgattctaggctctagaatcctagcccatctaccctgacaagtccaggatattcacagtccctgtggagtaagaaagctctgtgcatctgtcccaggttaacatgacctcacactaacatgatcctaaggcatctgacgtgcccacattccatgctgcatatgtggtagaaaagtggccctgccatcttgcagaagtattcagcctaagacgcccctatgtttcagggccaaaaagaggtactgagatttcctcaccaaatgccaccttgttctctgtacaagtggccagaatggtcctgtacaagttggatttgaaggtgcaggtcacacctgtgttctgcaaggcacgtagtctgccaacagcaacaagaactcggtcttccacatgagtgtctgatgaatttgaaactaatcagccaaaaaggccattctccaaacatttggattggtaaacccttaatttcccagaacacatatattctctgctaaacacacagcctttgttaatgataatgacagcacctttatcactggagccatatgtgcctggctgtctcagaaaggccaagttcaagcctccctgaatcatccctttcagctcccaccctctgttctgtttgaaggtgacactgggcttctgagtcacagtcactagagcccaagcatcatctaggagcactgatggagacagaaggttttaaatgtcagccatttggacagtgcccagccaagatggccagggctggaagcatcaaccacctggtcatagtcaccctccaatctagcagccccccaccccctataatctgtccccttgtaattcagttcatcagattgcactggccctttgggtgagttaatgatgaataagatgtgggtctggcctctcagaatctagagggagaagaagggcacgcacacaaccagccaagacataaggcagctgtgccgggtgctccatgtgaaagagatggaaaggaaatgataccgagaaataggcaggagggaccgatttgacttagagactcttaagaaaacacagcatttgaatcaaggctctgaaggagccttaagaaagggtcacagagcctggagaacaaggacatgaataaaccaaagacaccgaaactcagtcccaactttcccttggagaggccacagcagcacactggtgtctttcccgagtgtttatggagaacctctgtttgggtttgtttctgccagatgacaggaatttcttgcggctgcagagtgacagccagagagagggccagtatgcccggctcatcagcccccctgtccacctgccccgaagcccggtgtgcatggagttccagtaccaggccacgggcggccgcggggtggcgctgcaggtggtgcgggaagccagccaggagagcaagttgctgtgggtcatccgtgaggaccagggcggcgagtggaagcacgggcggatcatcctgcccagctacgacatggagtaccaggtggggtgagcaaaaagggaatcttgtgatccgtatttcaatatttcaagggccgagcccattcatcgttagggaacgtggttaagcgctactgttttcattgtgtttctcacgttgccatggcaactgaatgacactcttatttgttattcagaatatgcctatctctacacccagacttggttctttgttcctcctgttgccttttatattgctgaaatcttctccaacaaatgtttctcctctccattttattttagattgctatcaggtaggctgacaaagggacacagaagccagagaaataaacacaaacaaaccctccacacacaaggaaagaggcctgtggagccccttcagatctggggaggaaataggataatctcccagacctgtcccaggcagcaagaacacaggaaggggagcgggggctgttggcgctcagtggccggcagacatgagaggctccagagtgagtgctctctctctctcaccagctcccggaatggagttctgttatctctgccccacagagcaggagactgaggcacagatgggtatgttcagccgtggttgcaacttgggtaggagtagacacactgtggaagaggtgactgagaaccagccaaagcattaaccttctcctccccagacgaggagcagcaacagatggctggtgcagcagccaactgctcacccagcttgccagaggacatgtgctagtttgcagagaggaacctggggagggcgagcatgagaaatgactgaagaccacagagccgaggggcttctgtgtacagcctgcagtccctgtcccttgaggttgcaaggcatcctgagaccttccccacccccatctgggttcccacttactcacctgagtgtgttgtattgtaactacctgtttgcatttgtgtctcagccattagatgggtgagcttctctgggcagagatcttgtcttactaggttttgttactatccttatgtccagggcatagtaggtgctcagtaaatggctggtgaaaaaacaaattcttttcctcctagttgtaataatgaagccctaaggcaacttataataaggagcacaaatcaaaacctatgtgctgtatttctcacattacccccacctacttgtgtcttctgagttttcaaatacctggattgggcatttgaaagatttatgagacaggaacctcgaaaatagtgagggaagtttcaacccccctttcaatagtctctgattatggcccttttaatcaatacattctagttactggacaacaatatccacccccttgttatattttcttatccccttaaatatgcgtttgatttgaacaaactcattttgaattaagatttcaagagctgtagccatgtggtcaacagatgtgtaccaggtgcaataacacacacacacacacacatacacacacacgctttaagctgcagctaacagaaacttggaaatccttgcaccgtttggactaggagactcagttaaccatggctcttattcttccggcttctagattgtgttcgagggagtgatagggaaaggacgttccggagagattgccattgatgacattcggataagcactgatgtcccactggagaactgcatgggtatgtgaatatctgtctcttcatggttctttcaaataagaccccaagggctgggataagcaagaggaggcaggacaccattttccaatgcagtcgttacccagtgggtggggcagccacagtctctgcaaggtaaggtgtgggtgtagttgtgtcttaggctgggttcagggtgggaaggggtgtgaggtaaggggacggcttatatccctgttcccaatcagaaatagacatgcactaagtacatagaggttcagggtgccaagaccccctcagcaaaccccagcttttagcaaagaaaatgctagaggacgagagcaactgccagtcaaaattatatgctggaaaggtttgatggatttaatggaagccttcactggtgagcaaaaatagtacatatgttatgtaagagtgataacacaattacctgagtagttattttacatgaatgaattgcagagcaaactgtggcatttgaagtaagatttcagatttttctttaaaacgaatacctctaatgcccaagatcccaaagttgttgtaggattaaacattgcaggccaggtgactggcacgagaaggatatcataaccatcatcttggtcaaaagcacctgaacagccagtccacctgagaggcacgcattttcttcagggtctcctgctgcagatgaggtcaccctggctgtgtcccatcagagccatggacatttcccaaaccaagaaaggaaccctgagaaggcatgagggttgctttcagtcagcagagtggctgcagtaactcaccaactgcctttcttggcacacgacccctggtgtgtgtgtgcttgatgatgtcagaagcacctgggaccaccccagtccctccgggcaactctcaggccccaggcatctaaaagtaatccaggctctgagaaagtaatcagcagtaagtaactgattacaatactttagggacccatttcttgatgaaggactttttgttccaaagcaactttgagaatcccccctcctccgccatcaccaccccatgatgatgatgtgttagagccagcctagaacatgtggaagatggggggccctctccatggagtggtacaaaaaaaccgagtgcagtcatgtttatcatcatattcatccaattattcactctatgttcacccaattgtttcttgcctttaactaagtccaattttttgtttgtttttttcagaacccatctcggcttttgcaggtgagaattttaaaggtaaaaaaaaattttttttttgcatgctttttccttcccccatgtgatgtgaatttgatggggggaatcaacctccaaatttgtcaaatctcgcaagagaaaagagacgccacaccttcctgccgctagatggcactagcaacacctgtagatgcgggaaggggattgagagcctcactgtctcttgtttaattaaagtttagaaacctattaatagagacaaataggttacagataaacctttcagccttgcattgtccaacggggagcaatgaggctgaaaatgcaggggtggtgagaaaggagagactgtgggaagactgaaccaaaaaaaaaaaaaaatcagtataaattaaaagtgaaatgaggtggcaatgatttattttagcctgaagatggtttctttccagttccagggtaccaaggcagcggtttcagttaaccacagagccgaggggcttctgtgtacagcctgcagtcagtacctgcagtcaccatacctcagtgaggtacggtggcaggctgcttgtaagagaaggaagttaggaaagagacacagaagtggtggcctcaggagaaagagttgccacatttaggacccggtgtccagtcaagggaataaggaggtgcattcgatgactggagctagagcactttaaatgcaggactgaaaatcagaaaggacgtgttctcccccgagaaagcagagagagcagagcaaagtgagaagaattggggatgcttgcctcatccaggttataaaaaaaaaaaaaggcctccagccttgggtgatggcaatgttgtttgtgctgttacaatgcagcagattttacattttgccctctttgcaaacctattagcggacactgctgaagttcccacaccggtttctaatgccaaacatttaggagccactctaaatgcgtcactgcagttggcctgagtgtaaaagcacacacaaaaacaccctcaccaaatgatgggggttcttcatgacctgtttgatgccagcaattgtgaggattgctgtgccctctttgtactggctgggcttacccctacaagtggcagcattgcagagataagggcagccatttttatatctgccgtctagactcgttatcttcactctcattaatctgtccagctctgggctagaaagagatgaattcctggtttgccacctagatatgctccctgactccaaatcatctcacccaatttgccactcatcagctctaagacagccagtgaggaacaaagctgcagacgacaggggaatgacagaccgacatagaatatattgcctttcttacccttcctcgtgtccctgaaccccatgcccactccctgtaccacagttctaaaagtattaagagtattcatgtgcatacactggtgctctctgggggtgaggtttatgttaatgtaaatccaaagtattggaggaaagctgagagccaaactgaacgactttggattacagtcgaattcgagttctaaccttcaggacccaaggtaatgcttatgttggtgaagtgaaagctgtggatgttgtttcgcctgactctctttgggttgtggagactcacagctcccagaaaggctgggtaaagacgtgccagcagctgctgcagacactgttctgtgtgcacaccgtgtcgggccatgactgacaagtacagtggctaagtgctaagtgcttcacttccgtaagagaataagcagaccagggcacgtacactctccttgaaactgtgcttaccatgaggcttcacaggccagtcatgctctcttgtaaaaaatatatacataaaatctcatctgagcagcagtgctcatttagccaaaataaacacagggcttagtaacttgaaggtaagaatttccagggtgctcctggtgggccgctttgaggctaagcaaaggcagtgcacaagttgcatggattaggccatggctttcgtcctggaggatggcaagcatctttgggaagaagaaaccaaggcttggggagcagagacttggccaatggacacagtaaagagcagaatctgaattgggaatggagaatttcattcaccttggcacgttttacatggagatctgagttggtaaccagatgaacctagtgccatgggtctcttctttctggctgagacctgtttgaccacagcatgcaactctgccttgagcaaacttttctgtttgagagaggagaggactgtgtgttccatctaacctagtgactcatatactattcctcttatggtcaggacagcaggagtcctctcttgatccgggcataaaatcagccttttcactcaaaaaatggaaacagagaaatcagggggcaggcaaggtatggaaagttgatgttgaaacactgccaaccataggcatttacattgttatacatttttcaaattagagtgtttttcttttcccttataaattaatcatgcaacaaaggtaatctcattctttgggagcaatcactgtacaggtaaatctttagtgaaatacaataaaagtggcctttggacctggagttattagatggtcgcaatcttttatatttggaagtatctttcattttccgcctcttactgatttcttgccatgcaatattattttaaatttaaatcatcctgtgttttctgctgtgtgtgtgtatatacatacatacacacacacacacacacacacacacacacacacagacacattgtgtgccaggatgtgagtcagtaatgaagaaaagcctggaagaaaaagagatctgtgttgagaagggagaaagagaagaaagaatgaataaactgtgttgtcatgtgattttttaaaaagacccttttttgtggttgttatgagtcacattttaaacaatgtagcctgggtgtgcattcttttcttttcttttttaaagcagtggctataaacatggtgccgtcatgtatctttttctaggatttgagctttaacaaatgaaaaaccgtgtgtataaaggggggaaaaagaaccgaaaagtggtgtaattaaggtgatggattatttcctcttacccaatactttcttttttcaataaaggaaacaagaacaataaagaagccagtaaaaatatatgaagcccataatcagagttctggggtttgttgaccaggtggttatttttagcagctcaccttggaggcaagagtttttgttcgtgttagaggctgtggtttctgagcagagcacgggcagagagacgatctggtgccctacctgttagagactcacggaaatcccagctgggtgcacctgtggaaggtggttgtcagagggaaggattcagaatgactgtcctacgctagtggatgctaaaaggaacatcaatgtctcccgtttcagctgggaatgtggggtttatgactcagaccattcctaaggtccaggggccccatttctcgggtctccctaggtgcctttctgcagttctccacagttctcatccagacaaaaccaggagaaagtgcacatccacagctgtctcttgggcatagaggggagcagtattaagagaggcccattttgggggtaatgctggctggcatttgactctattccttaggctttaagttctgtttctttggtgccaactggccaatctctgcattttgcacccccttctctcctttcccattcccaccctcaccctctattgcctgcctcccaaggctttgtccaccagggtaaggtcccccatcccagggcctggcctcacattccctttctccctggactcccttcctcccacgcctccttctcctagaagcacttctgagatgcagagagggttaaatggtgcttttgcacataaccgtctgatgaaaggcagagaagtgttcctaacccctgccggggttccagataggcagctgtagtgtgtgaatcctcctccttgcccccacccccttatgtctccagctgccagattaaggctaggtgttgctgagcaagaaagcatggagatcagatgtgtgaagcgggtaactgcttggcggccatccttccccaggggacacagaggtgttctttgtgaggttcgctggagcatgccacctctcctgctacagaggcctgacacgtcccctctccatcagtttaccactcatgtaaacaactgccgaggccagcttatctatgggtggaagaaaatgtttttcaccaacttttctctccaagaacacagggacaagactcagtttacagaaagtagcataagtgccaccaaagagtgtgaagcgtccgagacttcagccagtcagagatctgaattcggaggcatttaaaaatgcctctagatgtgggagcaatccacatggtttctgccaacttactgaaaacatcccggcgcctcccgccacaccatgctcataaggcagatggaaagagtcgtttctcagggatgcctttgtgcttgtgcgtcttttttccaaacacatcagagggcgtgaccacattcttctactatcttctgtaaacttctctagaggagccaacctttttcgtttgtttaatctcacaaattaaataaacctttatgtgaaatgttcctccaccagcacttcatttttaacctgtacagaaaggactgtgcagacaggccagtcctaaaacaattctgacatgcaatgagccttttttgaaagagaaagagagaaggcttacccttggtgtctttcaaaacacttcttctggaaacctgggtgactcccccaggtccagatgatatttcataaagcagctatagtatatgctttctcatttcagagattcagtgagaaactgacttgactgagacacgccaatcctcagacaggttcagacagaaataggaggcagaaaggaagaggactgtttcctcttccctccctacttggttagagcaaggaatctgcaaacttgttctgtaaaggccagatagtaaatatcttgggttttacaggacatacagtctctgttgcaagtattcagctctgccattgtggcataaaagcatccataagcaatatgtaaacaaatgagggtgtctgtgttccaacaaaaattgatttacacaaacaggcagtgggctggatttggccaataggccacagtgagctgacccctgggttagagcacaggctgggattttgtccacctggttctagccgtgactctgacacttgctagcagtgtacagttcctcaggggaccctgggccatctcttgggtttcactgaatgcttctctgcccttctccacaattatcctccaagtgaaaccaggagaaaatcacttgtcctctcaagtactcaggtctccctttggagggtcatgaggaataaacaaaattgattcatgtgaagcccgtagaccaatggttaatacacaggaaatgtccactcagggtggccgttgttacagacacgtttcccaattgcatagtgaccctatttgcagataggaatgaccggaacactacctcatgtgtaactgtttttcttattttctcccatgcctggtttctcaaactttattgtttctcaaaattcaaattctttgtgtttgcattgcttttctccagggggctcagaatttttacagatgggagcctgtgcaaccttgcaaatgcacttggagttcagttattgactatttaagtatctgtttctgattatctcacacaatgggaaaactttgtagagaatctggggtgggaattaatgaaaaatagttcaggaattgaaagtgttttccaggtgaaaaaagacatgtgagtaagcggtagaaattagatcaatcaaagggaaaattcaggtcaacagatcaaccaactccaggcaaggttgaattctcacctacactttcacccacctagcccaggctccttttttgtcaagcaatggctcgatcacccccagatggctgaaggggcaagtgaagctaaaattgcacaactcagcaattcgggcatctggtgcaggtgacatctgcctaaagtgggcacctttttctaatttcccatagaggtgccacatgagctagcaaaatctctagcactttctgaaaataactctccagggaagtaccagtaggtcatcaacattttccagggagtctgaacattggtccaaatatattcccctatgccatccgtccatttatccatccacctatctattcatccatccatctggcattcattggattgctgatgttgtctgggaaggtgctttgggtatggatttaacccctattgatttatcgtcttccttttctctagttggcaaaccacagcctcattagcatacagctctccaaggctggaacagggccagattctaaaccagcacactccacctgcctttggagttgagtctttttagctagtgaatgttctgagaaacttctagcccccagctgcaagtcaaccaagagttgcttgtaggggatcaggaagggtttgctagtcatatcctctcttttctaacattaacgttatttctaacctcttgacattaaaacatgaattcacatagtactatttctcatttctccaaacaaatgcccaaagaaaatgtttaaggagccagtataatgtcccccaagtagcttttgtcactgaagttttctacatgttgataatttcaggggagagaaggataagtagagaaggagaagagggtcttacttaaagtggagtttgtctttcaagtagagcaggattctgagagactatgtctgtgtctctgattctaaatatgtaatccatgtactaggatttcaccttcctccagcaggtccccttgattctctccattgtgccctaacattgtctcttatcgtaagaaacactgtaagagaaacatgaaggcttcatccttctccagcctgagcactttaagccataggttgtgtattttgtgttggaaaccagcattttggctgaaggaaagcagacttttgaacaaagatgatgtagtgatggagggaatgtgggtagttgtgaccatgttctgcttgacaaaaatttctgctcccacctctgtggtctggtcaggtacttctttagagggaaagctaatccctgaggatttatcacctcccttttcttgatgggtgagctgcagcctcattaggggatggccctcactgtggagccacatgaaaatcagagacaaaccccaggacaccctttggggagagaagggatgtctctgaggaactctgggggcatcccttaacactttgatgtttcctgtgcatttttgtaagctcatatcgaaaatccagcagcaggatggttgccaggcagcagatcctcttggtgacctgaataatgaattgacaccagttgactgtgacttgcaagctggccacttcaaggagccatttccagcaccttgctttctcttcctctctttctatgcataatttccaccatggccacaaatatgagagagagagaggcctttctcagctatggtaatgaaactagtaaaagacagaattagtttggggacaaagacaaagagggcaggcaataaggtgggagaagaggaagatgtataaagggacattcaggggatcctgggattctggggtcatttctaccccaggggttgtggatgtggctgtcaaggtgtgtgcagagcaacacatccttgtcaaagctctgccaatgttgtgggacttctggtcacccaagaggtgccaatgaacctgcaccctagcggaaggggattcatacagcaggagaaagcagtgattaagagctaagaagttgagcaggctttgaaatattttccaagaaaaatgttctcatttttctatcacttctgagaagacattagaaggtctgacccacctcccacctattccccagatcaaagagaggagttctgatgttcaggctgcaggaattagagaacacagactcagaaataggagtcttagcctcagttcagtgtttgattcaccaagcatttattgagtgccttctttgtataaacccttaggtatggatgagagcaagttcctcatgatgagagtgagttcctctgcttaaggagctctgaatcttagggtgggtagtgtaaggaggcatgaaaatagaaatgagccccgtttgcatcttgagcagagggggaccaccctctgctcacagggtaggaccactaatgcatgaaggagcccgcagcacttcccacccatggctcccctgctggggcaccccatgagtagagaggatgcatctttccggcttaatgcaaacagctagggaggcatttttcataggagaagcatatatcatttttcagaagtaaagatcatgtctggttttggcaagctcaaaagctcctagtccctttctgggccagattctcatctgatgtaaatctttgggagaatcaagttgtaacactgctttgcatcaagtgggactccagccagtctttccccagagttaccctgggcttaaatctactacatcatctccatagcaaccggcagcggccagtgaacgtggttgccttctaaatactctgccagcttctcttccctgctctgtcttttctgtcattaagaatgatttccctccctctctctctcactcactcactctcgctctcacataccctctgtcattttgtgcccacattttttttgttgcaacttcccttccaatctgcttttaaaaatcctccatccaattaaaaaatgaggatgcattagtcatgacttaacagtggtgattgacctgtctaggcaagaccaggctaatttcaatgggcacagaagccttggcaagccaaagtggaatttaccttcaagtctagccagcttaattaatacattgttgctgagaatgctggccagccagaccaaatatggtgtttccaccactcaggaaatctgcctcactgaatcccggaagtcatgtcagcatcatttacttgtatgtatttgtgtatgtgtatgtgtgtgtgtgagagagagagggagatggagggagaaagaattagaacacttccatatattataaagtgattgtggttgaacagaaagagaagagatgtgtaattctaccattcttggttgaatcccatacttactatttaactagctgtataaccacttaacttaacctctctccacctctgtttcctcatctgtaaaatgggtctgacaatagctacctcccaagggggtaagtaggaaataatgcaatcgttgagaagtgcttggcaggtgctaaggactgagtaccaccttagtcccccagacccttccctgtatgtcccaaagcatgtgtgtgtttctttctttttttaaattagtcttttgattagtctgcatgctctcagcctagcaacactcttctgtgtctctccaccagggggcaccctcctgccagggaccgagcccacagtggacacggtgcccatgcagcccatcccagcctactggtattacgtaatggccgccgggggcgccgtgctggtgctggtctccgtcgcgctggccctggtgctccactaccaccggttccgctatgcggccaagaagaccgatcactccatcacctacaaaacctcccactacaccaacggggcccctctggcggtggagcccaccctaaccattaagctagagcaagaccgtggctcgcactgctgagggccgaagcaagaacagcacccaaaacaaacgagaaagactgcaaacatgttgcctcgattttgcacttttttctcctcgcctagtttctgtgtgaactctcagacatctctttcccggatccccaaccctgagcactcttatcaatcccaaccatcctccttgggttcattttggtttctggtttttctttttcctttttgttgattccaaaccaacaaacccaactctaatgctgcatcttggactatccgaagagatccacccccaagcactccacaactcaaggctcagctggttttgttccagagactggttcgcttgttttttccccttgccttatcccatacctcctctcagtgggcagtctgccaggagacgtgaggggaagcctggatctgtgtgtatgtacatagtagacatgtgtgtgtgtgaatagctctctgtgtgtgggtgtgtgagagagcggctggttcattgtgtgtgtgtttgggcgaggggtgagtgttcagagagggcccctttaactcttatgttacttctcctggggtacattttacaagaaaataatatactgtacaagttttgtttacttggagaagagattgaagctttttgttgccttatctagctctggctgggtttctgttggctgtcattgtcatctccaggtacctaaagaaatagaggccacatgggatgcagtgtggcttctcccatccctatccccaacccacctgacccaagagaaggttcccctagcacactcaaacaagacccccttgtcttctggtgtctttgaaatgtcaagataacagccactgggtgtctgcggaaccacctctccagccctaaagcaaatctgtctcatgttgccttataaaagagaagctcataatgaatgtttagcctttatcagttacatccaatcttggaataagtcatagagaataacaagtctgggactgacgtaggaaaaacagtagtctgtttaagttgagaggaggaggaggtggacgagagaagggaggagagggaagaactgaaatgtctcctcacccagggtggttattgggcccaacttgggatggggttgagtacgaaggttaaaaaacatatactttggtattatattggtcattgtaatagcagttgtaaaatatggggggaaaagggatcatttgctttcctttcatggtgttaatgtgtgcctgaatctatagccgctaaaatgtaaggctgtccacctgacttatttaaatattatcagagaatagaaagtaatcactttttaagtgtacctatgtgctgccccttaaaacattcatggcatctggcaaatagacccttgtaggctggcctggcatattcagatgttgccgcatcatcacagagaaggtcaaatgaagatgtaaccattgctgctcatgtgtcttctctaagcaacaaggggagcgggatgtaagagagaagttgctaatgatactgtacaaaggatggattaaataatgaagtcaatttcattgatagaaaatgcaaattttaagattctcagtgtatgaggtctcagcctcgggagcatttattttttactttcctgctaaaaatccactggggaggtataaaattcactccaaagaagtttgcctgggccaaaagcctccaggttccttctgagaacaaaatactaatgattttttttttttttttggctgcttgggagagactttcagcattctttcacgatatccagatatgtcccttcagcacacacactcaactttctcatctggttcgtttcatcctcccgaaagaacggtgctctcccactcttactctatttcaaagagctactctgtctcaaccacagcagccctgccaagaaaaggcaagatgaaaggctagagcatgtgctaccttgagatttcaagaagtgtcctacctcagctgaagatggagaaacggggagtggagaggggatcagcccagggtaccatgtgatgactaatatgccactcattaagggcttttacctcggctgtccacatccagtcatgcatttggggccaggcatgcctgcgaaatgattgacattcctgtaggtgccccatagaggtgtggcattgagaaattatgtctggaaaatacagccagtgtagtgaccagctgagttaccatataccctgatgattccccttctgtaacagaaggtgacaacaactttgtgaactttctatatctttatctgatgccccaagtggcatcatctttatgtacatgccttagttgagaatatgagactgctctaatctttgtgaatgccttcacacttcagctgaggatgtcaccttctctgtcactccccatcctgcaacctctgcctttgctctgtctaccccagcaattttcatagtgttatccaggtactgtgctaaaaggtcagctcttctgtaaaatgccatgcttcgcagcttcaaaaagcaaaattctgtatttcatggagggagggaagggtcattctcttctaagaaaaatagactggacaggcgaatgcatgcatgcatgtgtttagagttgcttctcagaagacaaagagatgatagcaactattaaaatatgaatgaatgaatgagtgaatgagttgaaggcctagctcgggctgataaagcttttgccttagtagaggttttatgtcaacaccttcaggagggaagcccttatttctgggttgaactccccttccatgatattatgctagcaattgccatcacttagttcctggcgaaggcagaaaaagaaaacaaaaaatcagcattgtcattgacaaaactggatgctgaagataaagtaaaattgtcttttcccttgtcccacatttttgggattaaagccagaattgaataggaaatacagtactatttctgaagttgatagccgatctttaagaagaccctgtctttaaaatgaaactagcaggcaaacacctaaataatcgaaaattaccaaagaacaacaacgaaacaagaaaacctaaagatttttacttcctattcttattcctttccttattactgtgacaccccttgcattgctcagttgcctgtgtgtcaaaataacttgtggacgttggaaattatttgaaaatgtattgtgtggaatgtaataaaatgatgatatttttatacaaacatgtgaggttttttttccctttgcctgtgagaacaaagttgaaatgtaggctttgagcaaactgatgcttccaaagtttacacatcaccttctgagctacagggcatttctgtgggaggtaggtgggttttctccttgaggctgaatgccaacttttccttctttttatttttattactgcttgttaggatttttatccaatttgtgcagctgagacaacttttatgattggtgtgggattttgcaaaagttgctaagtgctaaattgctaaatgagattccacgaaatttctcttgatgacaaatccctggagattagattctactttcaaagggctccgggagagtggtaccagctaagctgaatcctgtacccagctctgcagagacagatcacttcctttgaagaagcagcagtgacatcttacccctcacctacccaattattacttccacagggatgtgaatctcccatttacgagcgctttcccagacaaaacgggaacttgtagcatgttcagggctgaaagatattctagacttcatttttgaacaggtaatgaagataattagatgatgactgtggacatagaactatcagagtggaacattttatgaaaggaacactataaaactttgaggagaggcacttggggaaacttactcagaaggccaggtctttcttgatgagtatttttctttggtcctcctctttagatggtgacccagttatataaaatatttctatcagaagggaactgggttgggccaggtgggggaaaatctaggaaaggcagcctcccagcagttcatggtttctagatagtggtcaagaagaggtcacattaatcctatttgcagataggatttcccaccaaccccattcatgggatttatcagaggccttctgacaacctgggagccctcctcaggggtccgagaaccatccttaaaggtcctgagaaaatgtacatgttcagaagatcctatttctgtcagagtcctgcttttcatcctatccaaacctagatccaggaaggagtgctttttacagctgtaaaacctgtccaagtgctgctaaaaggagacaggcttccggtttttagatcttacaggaagttctgttagtacagatggttcagtatagatgtcactatctgtcccttgcaggagaataaagtagaatgtcagtgatcagagcattttttgtttccccagtgacaagctcaattaccccttttgtctaaataacatttggctttccttaaagccatttgttcccattagtaaagaatgaaataaaaatatctcaaaagtgttgatttcaaacaaagacccaggctcagtcaacatttccttgagctgacctgggaccaaacttgccggactgaactaaattagccatcacttatgctttgttggcattactgtttttggaaccatgtttgggaattttcccaccttggttctagtcccaagacttattttaagggtacttactccccctaaaagggcaaggactgttaggactccaatcttagatgtcaaacagggcactgttaccaccaaacactcctcagtgtggcatttcttatgtagcccaagcataaatgttcagaaattttgtttccatggatcataaataccagatgtcaaggcctaggccggtctgtttctgctcctacctggttctttgtgatggtttcagtgtgtgttctctcttcacccactgcccccctagctcagataaccgaaacccagccaagctgaggtggcacagtgtttattttccttgcccctcttcacggcctctgcagttgttctgcacaaacgtgtggcctttctgtaatctctgatgaaaagagctacatcctgaagttttgacttgcctgcattgtgggctacacatctgagccaaactgcagatctgtaggtgaaggcttgttttttctctttaattgtgcagatcactggggctctcacagctgtaatttgcctttcatacactttagtgacagcccaaagaaaacacaaaacaaatccaaccagagaaaaagggagggggcgaggggaacaccagctgatgatcttacaatcagcagggaaaagaattgcctcatacaaataaattagtagctaggaatagtgtaggatttaattaatcctgacacagatcaggtgcaccacagtatgtatagaggtcagatacaatcagaaacccacacccttaggggtcttcaggccacaagcctgggccagagtatgtttgccctgactgcttggaggtgttctgtttggacccaaacctaaacactgaagagcgacaagatttgggaaatcgccaagagcaaaaccttatttagcatggtatggaacagtggagaatctaggtgcttcagcacaaccaagccgaagccattctttccccaatcccagtggataacagacctagaatcatctcctctctactgggtaaaacagttgttcttggccttttctgccactgacccctgagagccccaaaaagctaaagtcccgtgggcattggaccaagaaataggaaagaccatttgaacagtcaacaacagaggtacttgagggaggactgagtgttatgtgggaaaacctcttttctcggagtttcattgcttgagagtgtattgatactgatgatacagggaggctgctggagggagactttatagtaactggctgggtttctttaactcacaagttaaacatgctcaaaaagtgcaataatacagaaaaagccaaagtcgatttcattgttgaccaatcccagtcacctccccagaggtaactgtgagggatggtttgaggagtatgtttccaggccttgttttatacctttacaaacatgtatgttcatgttgagttatgtggtttggttaagctggggtttagtttggtttcatttggttttgtgtaaatggtagcacagtgtttgcttactatattggatgacttgcttcttttcatttgacatcttgagggtaattcagtacatactaatgcatctaccccatcctttatatctgcagcatagcattccatattgtgttgatatgccagagtgtattaactgctcccctgttgatgagtgttcagactgtgtctagttttttttttttttactattataaacaatactgcaatgaacatccttgaaattgcttctttgggcacatgttttacaaaggatagaatttctgggtcaaacacatccctgttttcattttagtaggtgctataaaaggctgaggtttgccgtttaaaattaacctgtccctgcttgagagcatagcagaaactagtggacgtcctggctgtagagcccctgccacatctgcccaacccatgtgatctctatgcctatctctctttctctacagtgggtgtgttgcttgcaagagaagaccttgggcacttttagctgaagataattttaaactcagggagtgtttcttcagaacgttcttttttttaactgccaacttacggggaatatggacctggctctaagtgtcagctccccagagctgtggtggctgtgtcactggagttaattctgtccctgggttcatcaggcagagtcctgttctccatgattaatgagttccacttgctttcttcaaagaatgcctgtgctgtgccatgctgttatttatttatgttttctactaaaaaatttatgtaaaaaacatcccttaaggtcagtatgcagtattgtgctgcagactaaactatcccagcagccagaggtaaacctacacaccaagaaaaagtctcaaatttgagaggccttggaccacaggcccccacactggccccaagaggggcagaccttgtgggcttccttctgaggaagttcagggctgcaatacccaaaggaaaggcactaggcagtgaggtggttttctagtgggatgtttataggcataggcaaagctactagcccccacaggggccagtagcaaggaatggcgggtggaggagaagcccagagacctgtcagtccaaacaccatttctagcaaaagcactgccctcatttctgtggtgtgctgagagaaaagtgtcataacaaagtggctttgactttgaacataatggagtgtgtgtggctatataggtccagtgtgtgctttccctgacctgccaaaaatccaggaccattgcctcctgggcatgaggtatgagtatttaactcaggaaagaaagcagcatgagttgagatctggatgaactagagtgcatctctctctgacacacacacacacacacacagtgccttgttttgtcttctctgtgtaattgcgcaaaattaaatcctttaaatatcacgaacattccccaaaacaaaggctctgctccagaattggaatgatagtataccatgccacggctttcagcaataccagtttctttctccagcagcaggactcattaacaggatgcctggactggacttccctgcaacttattaaagagcagccagctccagtaacgatgggtgtgcagaaagccttgagctagaggcagccttgaccaaagtctcattctccaaagcctgctagttattgaagcttcatttaagcacaaagaaactttttgtctctttgtgttttcttgctgccacccagggcctgcgagaacaggcatgaggatttcaggggctggtgtgggcctccccatggcttctctagggcagccccacagctggcattgagagtgagatggtagttattacaacctagatggggccaacatgggtgtgtgaaaggagccccagagatgcctcattcgccttggccaactgtggcctaagaggatgagccccatattagtgtttacaggggtcctgggcccacaaacccatcactgctttctggctctgcacctcctgatgtggctagggtctccacctctttctctgtggaggagctggtcaccactcatctgcctttgtgccaggtgcagtttgtctccaacctccaaaatcccctttctgcaccttccccttctcttgctgaccccttttcttctctggcatccttacactttctctttcccttcatccatcaatgccttcttcaaaaaagcatgggtcagattccttcacacaaatgccgcatggctacttcctccaataattgcatttttacaggggaccacacctgaagccaggtctcttagtaattacggtccttggccaccagcaagctattgggggaaatcatctcttgaatgggcagagagaggtacatttttggtagctgtaaaatgatatcacagagtcattcattctcattcattcttgtgttcagaagaagagcccatcttttaagtacagtgaattctgttagtgacatacaggtgtacagtttcttttcaaggacctacaaaataaaaggggctatctttcagaagatattcttcttcacattggaaatggatgcagttttgattcttcaactccattttctcacttgtccaaggttgtaccaaaccactccatctgagtgacatagtgatgtttctaacatccacacctcaaatattggaactagaggaggggagaaatttcaaagcccactggaaaaaaactccctgaaatatgaagatacatgactttttcccctagcatcccaggaaaaaaaataagactacacaagagggggaaaaaacagcaggttttccttgaaatgctctgtttttcccaccctcatgccctaagagaaggtagccaacaaaagaaatgaaaagagccaattgcttgttcacatatctacttacaacaatggagaatagctgatttttcaaagacttggggtaaaaaagaggttctagaattttctttcatcagctttgctgtgtttttccagtctgcacaattgtgaagcctatctttatagccaaacatgtctctggctgcatttttcttcttttcatgccattgttggggctcattggagacattctggcctcagctgctcatccgcctccacacttgaaagtattactaggtcatttcacagtcttcttgtttgcagtcagtatttccaattctttttagtgtttccttctagttattcaactaaaaataatagaaacgaatggctaaattcaagatcaaactcttccagtaatctcacaccaagccccctccttttttttccgcacttgaaaccatttgaaaaattccaaaaaatattttttccatgaccgtgcctagatttggctgtagcccaagagataaaagcctgtgataaaggctcttctgatggtgcttctaaactcaagccaaacccagcaaggaatgaatggctctcaagtagcccgacttcttaacagaggagatttggcaaagtttagatcaacacctgaatgtttggctccttattgcaacttggatgaacaaactgaattgggaaattaagtgtggtggggaaggcggaccttcagccaatactaaatattaaactgaattaaaccgaattttgaagtgccaagaagaatctccttagtcctttgttatttatcttttactgaggtctcagtgttgtatttcctgctgggattaaaagagaatggctgagagaagtttctggaggctactcatctgaaaaatccagcgatttaactggcccatggggttcagaaacttggaatcaagttcaacaaaggcactaagtggccaagagcttatcccaaataaatcacagcccccaaacaaggtgttgaaaatctatggcttactctcagttctactgctgatttattcaatgacttattgcacttctctaccctccctcctcaatttcatctctaaagtcaaagtgatgacacctggtacctgtgaaaatgaatgatttcagtggtttcctgtgtgtaagaggctcttcgatccttgccttcaaggctggttgaaatgtggtaggttaagtggatgtgctaagactggctttccatgaggttttctcagcccagcctcagttaacacagaggcttaaaactataggcacaatttacccactttgtcagttcctcagtcaccaattagcaggactaagtcctgagccaaacgggcaagtattgaacacatagaacctcatgggttctcttgacctgtcctttttgtggtcttctctttctgtgcacaccttaaaacaaatggtttcagggagtggccactcccaggagaggacagagttagggtgaagaatggggcagtgagcatcatggggcaatggagcccttttgttcagaagttgccttgtctccctcaaccatcaccctcttcaaagaaccctcatcagaaaggccctcgtacctttctcatttccttcctgtaaagacaagggaattctagaggagaggagagcatcagtgtttactttacagaggagcaaacagagacccagggaggtcaatgactggtcaaggctctgacacctgaggcagaaccacatgggaggtaggcattccgcccccagcctagggccctccacatcccacgccgcttccttcagtgcagggtgatgctgccactgaccaggcttctgagtgtctctgctgtacactccagatgacaagcctgtcatcagcttcaagcagacctcttaatccactgctcagggttggcatggaagggactcttcaaagaaaccagcacattagtgacctgaaatgatctgtgtcccagggctgtcttaaattatttacccaaaagtaaccagtggtttggggcagacttctcactttcctggccatattgtgaagctcctttacaatgcgggaagtaaacagtgtcgaggccaatatactcatacaatatgctctgtgtagacacagagcgaaggctgagaattttctgtaagaaactgcagaaaagcaaactaatgaaggaatgctaatcccaaataatcttaacttagaagaaggaagaaaatgagggagagaggaaagataaaaaaaagtgtctgtgtgtgtgtgtgtgtgtgtgtgtgtgtgtgtgtgtcagagaaagagagagtgagaaagaatggaaagggccataagagagggccttcttatttgaggactaaatcattctcagtaggaatttccaggcagcaggttggagtgtcttgggggtgtttcccctgagcagcatgtgtggtcttacactaccaggcagtgttccagggaaaagcttatttcattagaagaggttgggtttgtgactggatatggcgttcaccctttgtgccgtagtgttgcaatgtattgacaagcacactagagaatatttgactcttccagggtggagggtgtttctggaacagtcttgtgggtgttttcataactagccaccctggtctctcattccaaaaaatcaggacagcaggagatcagtgagaccttgaatcatgcctcaccgtgtacctactctgtctctcgatgatgcagagagaagggacactgaccaaaataaggtgactttttggcctgagactgatcttcatatgaaaatgaccagagttttgtgaagttgggttgtatttgtttttaagcagtagctactgtgcccacttgattactcaagctctgtaaaaccccttcccatcattcattcagagctgacctctttctctcactgtgctgatctgcaacagctggggaagggatgggtgttggagatcgggaaggcagaggtctgactctcacatagatatatgcaaggtggaagatttgtggcaaagctaggtgatcgctttgaattccttgatgagcctgatacgaatgaatgcaagccaaaagacaagagatcaggtgccatgtttgaaagcatttctatcaatcagacagataaagggaacagaaatcccccgatgcccaacttgcagcagcctcaattccacagtatcctcctctacactcccacattttccttcctgatagtggcccaggctcatttgcccaatccctgccctggactccagcagcacttgggagtcctctccgcaatgcctcactttctttcatgctaatttggcatgggtgagtcttcacttcccaaccaccctgaagggccttgatggtagacacctggtcccttacatctttattttccaaagtcatcagtttgtttcctgggcatgcagtgagccctcttactaagtggtgttaggctggttagttggttaatgaaaactgccctttgaagaacaatgtaatttagtttcctgctctgggtgatgcctgtcatggaaagcatgaaaccccaaatttcagatccccacttcttcatgttcatgagaagcccctcaaagccctactctatcaaagtagtgagccagtgaaacaggcaaccaaagtgtgtatccagccaatccggatctgagataaggcagactcttttattttattagaagggggcagtagggatatggtggtagttacagtgtcccagccacacccaaagaacttgaatgcagactggggatccaccctggccctaatacagttatttgagagtcagtatttgtagtcaggctgacctgagactgaatccacatgggggcctagaaggaaacagggtcatgggagcacaaaggttgaaagcggaactcgtgtgggtggtaagatcccttcctgacctgcattcttctagaggtttggcccattccactctccctagcccatctcacactcaccaacacacccacccactaaaacagagtcctggaacttcctcttcaagttttccccattgaaaacaaaattctgagtccctggttcctttctcccactctctcctgatgtctgccctgacttcggcagctaggtctgccatcctgtggctgccatttcccctttccagggagctgtggcctctaccctctgccttgggctcctagctcatcattctcccctctgcctcccagaggccggtagctttacccgttggttctcctggtagcatcttacctgccacaccttgcctattctttgctagaactacagggacctaatgagagaaccacattccttcctgctggcctcctaaggaaacaggctgcagtttacctaccaggctcaacagaaaaggaaagtggctggtaaagggcaaagatgcttttgagagagagaaagctcttaatcaaacacagatatcaagaatattagcaaggggactagagaaaattgctatcaaagtaaatggttttttgtacaaatgttccctttatttgtgttttccccagtgtgccattctttctttaaggcttggtgaacagatgtgcttttgaaaatgttgattaacttatcctttttttgacccccttcccactcactcaaactcaggggagcagtgattatataaaaagccaagtcaagccactaaagtgttcttcttcaccttaagtagcctttgattctccaggtgcagaaatctcagctgcatctgggcaattgatttcattgagtcttagaaatgggccaattcttaggaaatcatctcatccagtcctcaacctccagagacaagaggccgtgatctcctgtgataaaatgttctcaaaatcattagcatcattttaccctttttcctttaagatcaatgccacattcacccctttccagccagtgatctatggtatcctaagacttcttccctgagggtgtgagatggagcaagatggcattctagcctccaagaattcatcacatccttggcagaaacaagatccctaaaagcaagcataggatttggcccagaagtcactggcaggagccccgtggttctcatcctaggctgattcacatattcttatccagtgttctgcctcttttactggtgaagatgttaagacatatgagcagcccatcaaaccaattaattgttggaaatgtgacggttttcttccatgttttttttttttttcatatggaaaaaaaccctgtgggttgactttcacaagctcgatttgatccctgtgacaaacaccaccttcctcttgttgattcatgttcacatctcccttccaaggaaacaacctgctctgttggggcctggaggagaatgcagggaatgggcgttgaggtggggaggctggcgtggcctgcaggtgccacttgctgtgctttaaacatgcaaggaatgggctggagttatggaggattagtgccatgtggcatcaatcttttaagtggggtcttggcaagttgttttgtgcatcccttactagggaccgagggggatgagaatgtgctttagcactttggccagaaatgagaaagacttctaacatgattgaaaccatggcctccaggaaaagactgaatttcaaatgtgacagtgatggatcaatgctcagttcagatcatggtcaagtagatcttccccgagatgtagtgctgatgaaggaagctttcgggatggtctaaagttctttttctccctcttgtctgatacttcagccgtttgggattttgattttcttttaagccttgatttttggatttcaatttatagtagtgacttcaagattgtttatctgacttggtggaacaaaactctgagagggccatacacattcactggggctgtcttgagctgacagcttggaaaggcataattagcttgtgagataggaagaaatgataagatgttgctctttgccatgcatttgatgttctctattaatgttttaccattttagacagataactttcagtggttctgatttctataagttggacagcacagtgaatagagagacctgtattatcaccctcccaaattatcatgaaaaagaaaaagatagacagtgataatactggagaaaactcatagtaaattaacttagcctggctagtcagattggatgcccatctttgatctattctaaaccacgaagaaagctaataggaaaaatagacttgggaaggatgagaaatattagcacagatatgtgaaggtcaacaggcattatgacatgccttccatttctgctcttaaattaaaacatataatgatgaaacaagacttccttaaactaccatatgtttacatgaaatccagaggagaaagactctgatgcttttgtgcccactgagatgcgtgcctatgaagaggtgcagcatgatacactaaatggacatcccagtaaaggcagctgctgttgggcataagatgccattgaaggtgccttaaatgaaacctgtgttcctaatgaatgccagtcattaaaaaggcacagtggcaggggttgcttggcactgaagacccagagtttcttcttagttctgtgttactggttgtggttggaggaagacacaggtcatctgaaggagaacaatccagtaatgtccataatgaatgatctagaagtagaggtgattctctagctgcctgccagaatggggagtcattctcgtaaagattgcctccctgccttttagccatggtgatagaacttgttattaacttgtttttattttctttatattatagtggacatcccagaaatacatgagagagaaggatatgaagatgaaattgatggtgagtactgttatgatttagcaggtaatcgtaaaattcaagtttggttataaaggtgtcaacaaaaataatgctctgggtatcggagggcccaaatctagaactatcagtcagaaatatataaaagaatctggagaaaaatgagggaaccatcaatggatctgtcagggtcaactttagaggtttagaaagtttattgagttcctctgcctaatctgaaacagatcccctctttccagtaactttttacctggatggactttgaatctgaataaaccctttacaagtgaaagatcagctcctccatacgtgtcatagtctgaatcttttgaccttctcccaaaaatggcctgagtgaatgagcataatgtgaatattctcccagacctgctgtggtttctggttccctggcttgggggaaaccttcctcacactattcaagattccaatttggagcttcttgcaagatttcggtttctttttcacactgaccatctcgtatctttatatttattccaagttctatttttccactgcaaacacatatacttcaagaggctagagggctgctgagcaaatatgtagatgtaatttcttccctcaactcagaatagcacaggtctctctctgggcttctctgagtaccagagttgatctccaacagactcaacagcaagattccacttaaagaataactgtagactaagattgatgaatttaagaggaacagtttatagagcagctgcttttaacctgcctttaatcagaaacttcatgcgtagttatagaaactggagtgactaacccaaacagcaccttgttaactgactgcagactctccctgcaaaacccagtccaacactccttttatgggcaaaagtgcatgaccaacctacatggagagaccgcagtagatcaggcagaggcgcactggaatggagtagaaagggcaatgggtaaggaggcagaaagcctgatctccattcctgctttaactgcttgctaagcctgtgacctggagtgagttacctagttgcctaatttctttaaacctcagtttcctcacctattaaaatatatataatatcctgccttcttcatgggattattaggatatttcaaaaaatgatgcccagatgtgggcatgccttggccacagtgtagaaacgtaattagattagtctgctagggcttccagaacagagcaccactgactgggtggcttacaacagacatatattttctcacagttctggaggctagaaatgtaagatcaacatgtggacagggttggttccttctgagggctgtaagaaaggatctattctagctctgtctccttggcttggagatggccattctcctgttcatacgatgttctctcatgtgtgtgtctcagaatttcccctttttctaaggataccacttttatcggataaaggtccaccctcatgaccttattttaacttgataacatctgtaaaggccttatctccaaataaggtggtgagggttaggacttcaatatgaatttaagtgtctgggagggggatacagttcaaccagtaacaataaggcacgatgccttattattaaaggaggtctgatggctgggaaaaatctgctgcttatatggccaggaataccaaattaggaaactcatcatgtgcaaatagtcccagactgtcctttcattagcttgaggaggttggaaaggagggatgtagaggttgccttgaacacaaggccatcctaggtgctgtaaagccaccccaaaggtgctgttaaaatcagagcttacctaatgtaagtcaaattatttatttatttatttatttttttggagacggagtctcgctctgtcacccaggctggagtgcagtggcgcaatctcggctcactgcaagctctgcctcccaggttcacgccattctcctgcctcagcctcccaagtagctgggactacaggcgcccgccaccacgcccggctaattttttgtatttttagtagagacggggtttcaccgtgttagccaggatggtctcgatctcttgacctcgtgatctgcccgcctcggcctcccaaagtgctgggattacaggcgtgagccaccgcgcccggcctcaaattatttaaatatcggatacttagtacttactatgttgcagacaccaagcactttacaaatattagttcatgtaatcctcctaacaacccagttgaggcagattttactattatccccatttcaaagaggagaaaactgaagcaaagagaggttcaatagcttgcccaaagttacacagctaggatgcggccaggctgggctttgaacccaggcagtctaattccagagctgctgctgctaactactgtgctctgaagagcctctgggctggggaggctcagtcacttcaccctgacataggcagtgcctgcaatctctcatgaattttatgtatcgcagatgaatacgaggtggactggagcaattcttcttctgcaacctcagggtctggcgccccctcgaccgacaaagaaaagagctggctgtacaccctggatcccatcctcatcaccatcatcgccatgagctcactgggcgtcctcctgggggccacctgtgcaggcctcctgctctactgcacctgttcctactcgggcctgagctcccgaagctgcaccacactggagaactacaacttcgagctctacgatggccttaagcacaaggtcaagatgaaccaccaaaagtgctgctccgaggcatgacggattgcacctgaatcctatctgacgtttcattccagcaagaggggctggggaagattacatttttttttcctttggaaactgaatgccataatctcgatcaaaccgatccagaataccgaaggtatggacaggacagaaaagcgagtcgcaggaggaagggagatgcagccgcacaggggatgattaccctcctaggaccgcggtggctaagtcattgcaggaacggggctgtgttctctgctgggacaaaacaggagctcatctctttggggtcacagttctattttgtttgtgagtttgtattattattattattattattattattatattttatttctttggtctgtgagcaactcaaagaggcagaagaggagaatgacttttccagaatagaagtggagcagtgatcattattctccgctttctctttctaatcaacacttgaaaagcaaagtgtcttttcagcctttccatctttacaaataaaactcaaaaaagccgtccagcttatcccatcctctgattgtcttctgacttaagggatttactgtggtgtaggttctgccagccaaccctacaagctgccatttccagtcctagcatttaagtaggatgttgttgcctttaacttttcttatccaggggaaaattgccattttagggtcagcatgaacagctctttcttgtatgcgatttaaaacaaactggaaaggaaacttcacacgtcaaaatccatagaagcgcctggacgaggcttaaagtgctttgtgagtgaataggagccattcgctaattctagacccacagtgtctggtggtggggcttcccttgtggggcttctggtggtggttttgccttttcttttccctcctccatgttcttctaaaacatatacatatatacatacacacatacacatattcttcaggtctctaagcccctggaagcagcattgtgtgatattctcagaggcaggggaaaatagagggaaaaatagagactattggtatgttctccccatcagcgagttattgtaactggtcaccactggacgggaaggagaacagaggagagggaaagagaagcccaacctctgtgatcatatgagggccaaggctgagcagtgtagacagagaccctttgaaatgcatttgtctctcaaatagactagtaaacaccgacttctcctttgggttacaaacaccatttcaacctttcgggagagtcagagctaggatgtacaagaactgattctaaccagaagtccgcaagtactgtggacaagaatgcttaaccatgctgcttcagccttgagagacctaggttcttacacatatgcacacacgcatacacacatgcacgcacacacacatacacacatgcacgcacgcacgcatgcacaccaatttatgtttttattaagtgccttgaaaaaatgaagaaaaatgtattttccctttatgtaaaaattagtgaatatcttatgaattaaggcattcctctttccctaaccccgatggctccattcccaagtaccccaactcactgctgatcctattaaaggaatgagtcctgctacccgagtggtagtcatagccctagatgactctcaactactcttcaaagggaggcatcaggaatagaatgaaactgtgtgaaggataagattgttcgcatcaagatccaaatcttgatttcatattaacgcctaaggattgcctgtgtgctggaaatatatttgaaactcaaccagtatgcccagcctattgcatatcattgtcagaccatttttgctgctgtggtcacccacgatttcatttgtcttatacccaggtgaaaggggaagggtgaatgggactggctggttcctttaaatgttaacttatggaaatgctagttcaaatggtaatgtcacagtgttttgtatgcagagagcaagagttcaaccaacagctgtttattcatgtgtgtgtgtctttgctgctttgagttctctgtatctactgtgtatgtgaatggtcatgtgggactcagtggtggtgttgtgactttgacctagggtccgagtgtcacagctgatcttggcactcggcactcattggcacagtggtagttagaggtgaaaagtagagctgtcaagcccaagggcttagctttagggctcctcctgagttcggcccacagtagaagcaagattttaactagccccttttcctcttcaccctcccatgatgcgcagtgttcagaaagctggtaagtcctagggatttccagaagtagcctgcagaagaaggtaagtttgaaagccactccaggggtcctgatgctgtcatgctcagtgagccattttacagttctccaaagtctagccctgtttcggacctgcacttcacctctaagttatgtacaactcaacctgcatccctctaaaagtcctatatccatattcaccattggctaatttgaggccctgagtgggccttgaatgctaaaaagaagcagggtacgcagggctacatgtagataccacaccaaggctggaggctggtctgtcataagacagaaagaaagacgctgggcccaattttgacttggccaggggacaccttggtgtgtttgttatctttatctgtgggtaggctagctgacccatctccttgagtcattccctttgggaaaccccactgccagtattgatctcctttttgccttgtactgaatgacacattacctccacactctcccggactaggtggtcaacagggccacagggttgctttctgtctttggtggggcaggggagttgacagggatgagggtccaaggaataagcatgaatgacaagaaaacaagggaaagagttaacctgtcacatagcaggttaactttttcagggtttgcagttagaggtattcgaccattcactggctgagccagatcacgggaacttgagagcttttactgtgattcttcaatgtaaaaaataaacaacaatgtcaaactgtgtttatatgatttgtataaagcctttttaagattactatttaaataaacattataccagagata

SEQ ID NO: 135 - DNA, 2846 bp, Homo sapiens
acagggacgcgcgtgcagggcgcagagctgggccgagccgtcgccggcgccacgcgagtcccgcagccgccgcgcccgggcaatgggccgggggcactgagggccgccggggccgagcgcggaggggggaccgagccagtgccgtgccctcgggccgcgccaacatgccccgcggcttcctggtgaagcgcagcaagaagtccacgcccgtttcctaccgggtccgcggcggcgaggacggcgaccgcgcactgctgctctcgcccagctgcgggggcgcccgcgccgagcccccggcgccgagcccggtccccgggccgctgccgccgccgccgcccgcggagcgcgcccatgcagcgctcgccgccgcgcttgcctgcgcgcctgggccgcagccacccccgcagggcccgcgggccgcgcacttcggcaaccccgaggctgcgcaccccgcgccgctctacagtcccacgcggcccgtgagccgcgagcacgagaagcacaagtacttcgaacgcagcttcaacctgggctcgccggtctcggccgagtccttccccacgcccgccgcgctgctcggagggggcggcggcggcggcgcgagcggagctggcggaggcggcacctgcggcggcgacccgctgctcttcgcgcccgccgagctcaagatgggcacggcgttctcggctggcgccgaggcggcccgcggcccgggccccggccccccactgccccctgccgccgccctgcggcccccgggaaagcggcccccgccccctaccgccgcggagccgcccgccaaggcagtcaaggccccgggcgccaagaagcccaaggccatccgcaagctgcacttcgaggacgaggtgaccacgtcgcccgtgctggggctcaagatcaaggagggcccggtggaggcgccgcggggccgcgcggggggcgcggcgcggccgctgggcgagttcatctgccagctgtgcaaggaggagtacgccgacccgttcgcgctggcgcagcacaaatgctcgcgcatcgtgcgtgtggagtaccgctgtcccgagtgcgccaaggtcttcagctgcccggccaacctggcctcgcaccgccgctggcacaaaccgcggcccgcgcccgccgccgcccgcgcgccggagccagaagcagcagccagggctgaggcgcgggaggcacccggcggcggcagcgaccgggacacgccgagccccggcggcgtgtccgagtcgggctccgaggacgggctctacgagtgccatcactgcgccaagaagttccgccgccaggcctacctacgcaagcacctgctggcgcaccaccaggcgctgcaggccaagggcgcgccgctagcgcccccggccgaggacctactggccttgtaccccgggcccgacgagaaggcgccccaggaggcggccggcgacggcgagggggccggcgtgctgggcctgagtgcgtccgccgagtgccacctgtgcccagtgtgcggagagtcgttcgccagcaagggcgctcaggagcgccacctgcgcctgctgcacgccgcccaggtgttcccctgcaagtactgcccggccaccttctacagctcgcccggccttacgcggcacatcaacaagtgccacccatccgaaaacagacaggtgatcctcctgcaggtgcccgtgcgcccggcctgctagagcgcgccctccaccccggcccccgaactgtgccttcgcttggagacccacaaagagagtgcgccctgcactccccgaacccgagtccgcgctgggggagcctcgcccccgcccccaccgggtgaaagtgtcgtctccgcttctctcggtgtggcgtgacggtaaccccatactctccttttgactccttttggaacccccacttttacgttgtgtccctccgcctcccccatggcgcaacaggagtcagtctctttctgtacaagggagaaaagctgtacgcgtttgtctcgtggttggaagcctccccttggcggggagaagctttttttcttgctagtattcgctgtgttcatggtctagaaatgcggtctggtctcgcctcgcctaccaatctctgctctctatgtatgtagcgtacgggttgttttgggtgaatcttgaggaataaatgcctttatatttcacaggctgtaaattgaacttcccacacgattagctttattatggcttgtgaactgctggagtctggctttacctttttgtatgtgaacaaatcaaattgcttaaaaaagagttttctttagtatagccacaaatgccttgaactgttgtctgggattgttttgtggggggagggaagggagtgttccgaagatgctgtagtaactgcctcagtgtttcacgtaagactttttggtttgatcatctttgttgaggtaggactatcagttccctctaaatgtatatgttgatttatgagtaattgttatttattctttatttatttatattaattatgaagattatgatattatttgattgcagatttttttggcgcgctgccccctccccaccctgccactcttgacattccactgtgcgttttagaagagagcctttttctaaagggatctgcttaaagttttaacttttatacctatctgagtgaattacagacaacctatcatttattctgcttcgagggtccccagggcccttgtacaaccgacagctcttacttttaaatgcaatctcttttctacatacattattttcttaattgttagctatttatagaaagcttcaatagaactgtttcaactgtataactatttactattcaaataaaatattttcaaagtcaaa

SEQ ID NO: 136 - DNA, 15523 bp, Homo sapiens
aaaggatcacgcgccccagtcgacgctgagctcctctgctactcagagttgcaacctcagcctcgctatggctcccagcagcccccggcccgcgctgcccgcactcctggtcctgctcggggctctgttcccaggtgagtcggggtggggattgccgtcgggccagttctccgaagccccgggaggaccggctcccgggtcaggtcatgcatgcttaggtagctgtttatgggaaggaggggctagagacagcgattgaaaggcaacagccagtaggttcgaatccagaccctgcatacctccacgtgtggccttgggctatagattgcagctttaaaaaagggtagggggttggagatggaggggaggggcgggcctcgttttgttgcccaggccggtcttgaactccgggggtctagccttacctcctgcctcagcctcccgagtagctgggatgagaggtgtgaaccaccgccttgcttggctagattgcgtctcttacagtttctcagctgtaaaacgggaaacgttatagcggccacctggcagggtatcttggcccagcgcagcacctggccccaggactcgatcatgatggtttgggaacttggctctgtgccaacccaacaaggcttaagggacccccacccccctcaagatgtatattctgttcctcatcctctctgcccctggggaagtccagggctgcttctacttgggggaattccagagctgacttatccgtggcccaaagctgagaagtgggacgccccagcacaccctcccccagctccagcccagctagggaagagggaaggggtcagagggtctttcatggtggtgtaagtttggggaaccaggagggtgggagattgacagcttggttaacagctcaacaaagcctgagatccaggccagcacggtagttcatgccagtaatcccaacactttaggagccccaggcgggcgaatcacttaaggtcaggagtttgagaccagcctggccaacatggcaacatcccgtctctactaaaaatacaaaaattagctggcatggtggtgggcgcctgtgatcccagctgctcgggaggctgagggaggaaaatcccttaagcccacgaggctgaggttgcagtgaaccaagattgtgccactgcactccagcctgggagacatagcgagattctgtctcaaaaaacaaagcgttctgatccggactcagacccagatcgcactgctttctagctgagtaaccatttctctctatgaaatgggaatggtcccagaatctcccttggagaatgtatggagccagtgtcctcacacccccatccaagatagaacaaatctgagacaggaatctttgagtgaggcagtgctgggctcagacattttttcccaccttcggaggcagcagaatctgagggacctgatccaaataagccccttctttctttcttttcttttcttttttttttttttttttttttgagacggagtctcactctgtcgcccaggctggagtgcagtggcgtgatctcggctcactgcaacctctgcctcccaggttcaaacgattctcctgcctcagcctccctgagtagctgggactacaggcatgtgccatcacacccggctaatcactgtgttagccaggatggtctcgatttcctgacctcatgatctgcccaccctgcctcccaaagtgctgggattacatgcgtgagccacagtgcccaccccgtaagccccttctttcttacctgcaaggtagccagttgctacccatcctgtgctgagttacttgtattagcaagggatggggtggctatactcacccaccttacagatggggaaattgaggcccaaagagggggaaactacgtgtctcagggagtgaggagccagtctgattcctggagggctgactgtctccacctgacttcttaggagggaggagggcaccaacttcacattaaaatctggttggacacagtggctcacacctgtaatcctggcattttgggaggcttaggcgggaggatcacttgaggccaggagtttgagaccagccttagcaacatagtgagaccccatctctacaaaaatgtttttcagggccaggcgcggtggctcacacctataatcccagcactttgggaggctgaggcgggcggattacctgaggtcaggagtttgagaccagcctgaccaacatggagaaaccccgtctctactaaaagtacaaaattacccgggcgtggtggcgcatgcctgtaatcccagctactcgggaggctgaggcaggagaatcgcttgaacctgggaggcggaggttgcggtgaactgagatcgtgccattgcactccagcctgggcaacaagagctaaactccgtctcaaaaaaaaaaaaatgtttttcaaatattagccgggtatggtggtgtcctgtagtcccagctacttgggaggctgagatgggaggatcacttgagcccaggagttcaaggttacagtgagctatgattgtgccactgtattccagcctgggtaacagagggagacccgtttaaaaaaaaaaaagtgatggctaaagtccttccatggctccctattgccctcagtataaagaacacatgtggctgggcgtggtggttcacgcctgtaatcccagcactttgggaggctgaggcgggcggatcacttgaggccaggagtttgagagcaggctggccgacgtggcgaaaccccgtctctattaaaaatacaaaaattagctgggcgtggtggtgcttgcctgtaatcccagatactctggaggctgaggcaggagaatcacttgaacccgggaggcaaaggttgcagtgagctgagattgcgccactgcactccagtctgagtgacaaagcgagactccatctcaaaaaaaaaaaaaataaaagaacacatctttagcatggccttcagtgctcacgggatcttcctgaattaatctccccctcttcatccttgctcactcagctccagccaccctgccccgggacatctgtacttgcctggaacttatttcccttttctccggacagccagccctttctcgtcatttagatctctgctgaaacattaccctgtcaccaaagcactgtctattctatcaccctgttttgtttttgtcaaagctcatattaacatcagttattaattatcttgtttgctcataatttttttttttttttttttggagacagagtctcgttctgttgctcaggctggagtgcagtggcacaatcttggctcactgtaacctccacctcccaggttcaagtgattcttgtgcctcagcctcccaaatagctaggactacaggcacgtcccaccatgcccagctaatttttgtatttttagtggagacggggctttgtcatgttggccaggctgatctcaaattcctgacctcaagtgatctgcccgccttggcctcccaaagtgctgggattacaggcgtgagccaccacacccggcctgctcatgaattttctctttaacttccacatcgaaggcaaagtattgtcttgttaaggctgtgcctccagcacccagcacaggctgggcgcacattcccttgatgaacctgatttgtaatgcctgtcgcctcttccctcgtttcttctaggacctggcaatgcccagacatctgtgtccccctcaaaagtcatcctgccccggggaggctccgtgctggtgacatgcagcacctcctgtgaccagcccaagttgttgggcatagagaccccgttgcctaaaaaggagttgctcctgcctgggaacaaccggaaggtgtatgaactgagcaatgtgcaagaagatagccaaccaatgtgctattcaaactgccctgatgggcagtcaacagctaaaaccttcctcaccgtgtactgtgagtaactgagcccggagggctggactaggcagacccggtgggagagacgtgcaggggcacctgcagaggcctgggggaatctttgccacttgctcgtagggtcaaggaggggctccttgcagggcaggtggggacatccttggaaagtccctttgtgaatttctttgggtacaattaaagtatttacaggctgggtgcggtggctcatgcctgtaatcccagcactttgagaggctgaggctggcggatcacctgagatcaggagtttaagtttcgccaacatggcgaaaccctgtctctgctgaaaatacaaaaatcagccgggcatggtgtcaagcgcctgtaatcccagctacttggaaggctgaggcaggagaacgcttgaacctgagaggcagagattgcagtgagccgcgatcgtgccagtgcactccagtctggataacagagcaagattccatctcaagaaaaaaaaaatgccatctctctatgcctcactctttgaacatatgacacggtcctgcttcagacactttaataaaagatgcaaattaagccaagtgtggtggcttgtacctataatcccaactactccagaggctgaggcagaaggatggtttgagcccaggagtttgagaccagcctgggcaacagagtgagaccctgtttctttcttttttttttttttttttttgagacggagtctcactctgtcgcccaggctggagtgcagtggtgtgatctcggctcactgcaagctccgcctcccgggttcacgccattctcctgcctcagcctcccgagtagctgggactacaggcgcctgccaccatgcccggctcatttttttgtatttttagtagagacggggtttcactgtgttagccaggatggtctcaatctcctgacctagtggtccgcccgcctcggcctcccaaagtgctgggattacaggtgtaagccactgtgcccatccaagaccctgtttctaccggaaaaaaaaagtaaataatttagctgggcatcgtggtgtgcacctgtaatcccagctgctcctgaggctgtgatgggaggattgctttaacccaggggttcgaatcctaggagttcgaatccatcctaggcaacatagcaaaaccccatttttatttaaaaaaaaaaaaaaagatatgagttaaaactagccctgggatggcatttttcacatattggtaacaaacaaaagaattgatggccgggcgcagtggctcacgcctgtaatcccagcactttgggaggccgaggcgggcggatcacaaggtcaggagatcgagaccatcctggctaacatggtgaaaccccgtctctactaaaactacaaaaaattagccgggcatggtggcaggcgcctgtggtcccagctactcaggaggctgaggcaggagaatggcatgaacccgggaggcagagcttgcagtgagccaagatcgtgccactgcactccagcctgggcgacagagcaagactccatctcaaaaaaaaaaaaaaaaaaaagaattgataacagctgtgctgccaaggctattggaacgtaggaggtcctaggacagtgctgttgggagcataaataagcccaaccctgtggcgggaaattgggcatcagttctcaaaatgtcatgggctgggcacggtggctcacgcctgtaatcccagcactttgggaggctgagggaggcggatcacttgaggtcaggagttcgagaccagcctgaccaccatggagaaaccccgtctctattaaaaatacaaaaaaaactagccaggcatagtggcacatacctgtaatcccagctactcgggaggctgaggcaggagaatctcttgaaactgggaggcagaggttgcggtgagctgagattgcgccactgcactccagcttgggcaacaagagcaaaactccatctcaaaaaaaaaaaaaaaagaaataaaagaaggtatgttgaatatgagtggtatgccaccctcacattagggaagggcagtttcggggaggctgtatttatgtataaaatagccctaaaaggaagtgggagaaatgacaatattagctggctatgagaagagaggctgggaggctgtgggagagggcttgggtgtggagaattctttttgttttttcctttttttgagacagagtttcactcttgttgcccaggctggagtgcaatggcacgatctcagctcaccgcaaccttcacctcctgagtttaagtgattctccggcctcagcctcccgactagctgggattacaggcatgggccactacgcctggcaaattttgtatttttagtagagacagggtttctccatgttggtcaggctggtcttgaactctgacctcaggtgatccgcccgcctcggcctcccaaagtgctgggattacaacgtgagccactttgcctggctgagaattctttttttgttgttgtctttttgagatggagttttgctgtgtccccagcctggagtgcaatggtgtaatctcagctcactgcaacctctccctcccgggttcaagcaattctcctgcctcagcctcccaagtagctggaattacaggcgcccagcaccacgcccggctaatttttgtatttttagtagagacgggatttcatcatgttggccaggctggtcttgatctcctgaccttgtgatctgcccgcctcggcctcccaaagtgctgggattacaggcgtgagccactgcccccagccgagaatttctctttgcgtccttcctactttggggacttcgaatggtgggaaagagttatcaaggccaaaataaggaattcaaatgaaaacaaaacaaaatcaaagaagaaaaaacagaagagcactgggcaggctaggcacgtggctcatgcctataatcccagtgatttagaaggccgaagtagaaggatcgcttggaggccaggagttggacaccagcctgggcaacatagcaagaccccatatctacaaaaaataaaaaacctaaccaagcgtgctggcatactagtagtcccagctactcaggaggctgaggtgggaggatcacctgagcctgggaggtccaggctgtagtgagccgtgatgacaccactgcactccagcctgggtgacagagaaagaccctgtctctaaaaaataaaaactggccaagtagctttgggattagccttgggttccagtcccagcaaggcctttaatagcttgggacatgacttctgcatttactttgcaatcaggtgagacctcctctgatggggaaaatgacacggtgagtgacaaaggatgttctcctatcattgtgtcagggcaaggaagcctctgggtaaatgatcaaatgatcagctttgcttctgatttggagggtgggtgagcagatgctgaccttcccaggtgagggaagtccccgaacattcccagcagcttctggaaaccccagggaaacctctttgaaggtcttttctgcatctctgcctgataggtctttttttttttttttttttttttcttttttttgacacacagtcttgctctgtcgcccaggctggatcactgcaacctccatctcccgggttcaagcagttctcctgcctcatcctctccagtagctgggattacaggcacctggcaccacgcctggctaatttttgtatttttagtagagacagggtttcgccaagttggccaggctggtctcgaactctagacctctggtgatccacccgcctcagcctcccgaagtgctgggattacaggcttgagccaccacgcgcggctctgcctgatagctgagagcatagaactccaggtttgagacctggctctgccacatttctccctctatgactgtgggtgccccactttgccttagtttttacctctgtgaaatggagcagatggctggcacaggtagcaaaggagtaaaagttatgtgggagggtggtacctgagagagactctagcttggtcttgccccacccctggtgtaaacataaagaagcctccctggatggctcaatcttctccaaaaaggttagaggtgtaattcctagaggaggcgaccactagctgggctttgaaggatgtgtaggagttcataaggacaggcattctgggcaggaggaacagcctgggcaaaagttgggagcagggagaaatcttgatggaggcaggaggaggaggaggtaggttggtgtaggccaggtgcagtggctcacacctgtaatcccagtgctttgggaggccaaagcaagaggattgtttgagcccaggagttcgagaccagcctgggcaacatagcgagaccctgtctctaagaaaaaataaaaaaattagggtacagtggcatatgcttgtattctcaactactctggaggctcaagtgggaggatcacttgaacccaggaatttttttgtttttgtttttgtttttttgagatggagtctcactctgtggcccaggctggagtgcagtggtgccatcttggctcactgcagcctcctccacctcctgggttcaaccgattctgctgcctgagcctcccgagttgctgggattaaggtgcccaccatcatgcccagctaatttttttgtatttttagtagagatagggtttaccatgttagccaggctggtcttgaacgcctgaccgcaagagatcctcctgcctcagtttcccaaagtgctgggattataggtgtgagccactgagcctggtcaagcccaggaatttgaggttacagtcagctatgattgcaccactgcattccagcccaggtgacagagagagacactgcccctaaaaaaaaaaaaaaaattgattgatgggaggaagggtgaggttggcagagccttgaatgccaggtggaggagctgggactttccttcttggggtgatagggagtcatggagggtttctgagcaggccagggattagatagctgaaggctggatttactggaagccaatgagcagttggctatggtccttgtccacgcggcccatgttgtgggcagtgaccgtattcaagaagggaaggacagacaagtatttgaatacttcagtgaccaggatttggtaaaggactgcaggtcagggtcaagaagaggtgagagcaggacagacttcctccccgctgcaccaggcagctgagctgggtttcctctaggggctgaggtttgagggtacctcaagttctgcaagagtctataggaggtggtaagagagaagagctggaggtcagagttttcttgactatatatatatatatttttttgtttttgtttttaacagcttaacagctttctgttttatttttagagacagggtctcagggtctcactttgtcacccaggctggagtgcagtggtacaatcgtagctgactgcagcctcaaactcccaggctcaagaaatcctcctcccacccttagcctcctgagtagcagggactacaggtgtgagccagcaggaagcccagctggttttttttttttctttggtgttttttgtttgtttgtttgagaccggagtttcgctcttattgcccaggctgaagtgcaatggcaggatcttagctcaccacaacctccgacccccaggatcaagctattctcttgcctcagccacctgagtagctgggattacaggcatgcgacaccacacaaggctaattttgtatttttagtaaagacagggtttctccatgttggtcaggctggtctcgaactcccaacctcagatgatccacctgcctcggcctcccaaagtgctgagattacaggcatgagccaccgtgcccggcctttttttttttttttttttttttgagacagagtctcactctgtcgcccaggcaggagtgcagtggttcgatctgggctcactgcaagctccgcctcccgggttcactccatcctcctgccttagcctcctgagtagctgggactacaggcgcccaccaccacgcctggctaattttttgtatttttagtagagacggggtttcaccgtgttagccaggatggtcttgatctcctgacctcgtgatccgcccgccttggcctcccaaagtgctgggattacaggcgtgagccaccatgtctggcctggccaggctggtcttgaactcctgacttccggtgatccatctgttctggcctcccaaagtgctgggattacaggcataagccaccacgccatgccgaagcccagcttgtttttaatttttttttttttttttggagaaatgaggtcttgcaatgttgcccaagctagccttgaactcctggcctcaaatgaccccgccttggcatcccaaagtactgggattacagatgtgagccaccatgccccagccttgctttcttgagatacgatttagaataccataagattcatcccttttaagcacataattcaatgacttctgtacaaacaaccatgactacaatctaattttaaaatatttcaatcactctaaaaaagaaacctcctgcttatgtacagcgactctgtctacctcttaagtgaattctcctacctttaatagccctattttacagttcaggaaactgaggttcagagagacaaagtcacttacccacagcaaagaagcaaggctgggtatcaaatgcaggacccccccggtcctgatgctttttttttttttttttttttcctctgagagagactctcactctgtcactcagtctagagtacagtggcgcgatctcagttcactgcaatctctgcctcctgggctgaagtaatcctttcctcacaagtaaacctcagcctctcaagtagctgggactacaggcacacaacaccacgcctggctaatttttgtatttttaggtagagacggggtttcactatattggccaggctggtcttgaactcctgacctcaggtgatccgcctgcctcggccccccaaagtgttgggattacaggcgtgagccaccacacgcagcctttttgttattagactctgtcattactgacttttttttttttttaatagaaacagggtctttctttcccaggctaaagtacagtggcatgatcacagttcactatagccttaaactcctgggctcaagtgatcctcctgcctcagcctcccaagtagcagggactacaggtgtgcaccaccacacccagttaaccattcattcattcattcattcatttattttgagatggagtctcgctctgtcacctaggctggagtgcagtggcacgatctcagctcactgcaacctccacctcccaggttcaagagattctcctgcctcagcctcccgagtagctgagactacaggcgtgcaccaccatgccagactaatttttgtatttttaatagagacggggtttcactctgttggtcaggcttatctcgaactcctgacttcgtggatccaccctccttggcctcccaaagtgctgggattaaaggcgtgagccaccgcgccctgccaacctttttttaatttttcttagagatgggggtctccctatgttgcccaggcttgtcttgaactcctggcctcaagtgaccctcttgccttggcctcacaaagtgctaggattacagcctgagccatcacacctggccaacaggtttttttttttgttttgttttgttttttaaagaatgtctaggccaggctcatttactttcacctgtaatcccagcactttgggaggccggggtgggcagatcacttgaggtcaggaattcgagaccagcctgggcaacatgctgaaaccccgtttctactaaaaatacaaaaattagctgggtgtggtgacacgtgcctgtaatcccagctactcaggaggttgaggcaggagaattgcttgaacccaggaggcagaggttgcagtgagccaagatcatgccatcaccctccagcctgggcgacagaaggagactcagtctaaaaacttaattaattaattaattaaaaataaaaatacaaaaattaacctggtgtggtggtgtgtgcctgtaatctaagctactcaggaggctgaggcaggagaatcccctgaatcccagaggcagaggttgcagtgagccaagatcgagccactgtttgcccagtctagtgcactgggctgctgaatttatttgaccagacacctagcaatagactttgaagttcttttccacttttcactctaagatgctgctgtcatgaataaggaatattttgatccccttcacaaacactcggggccctcttaccagttttcactgaagatcttgacattcctatctgcttaggtgtctgggcgtgtttgggggagatactgaagaggtagggctcccaggcaggtgcagttcgtctgttaggcaggcagcaaggtccacttcaccagacacccccacctctgttttcctgcagggactccagaacgggtggaactggcacccctcccctcttggcagccagtgggcaagaaccttaccctacgctgccaggtggagggtggggcaccccgggccaacctcaccgtggtgctgctccgtggggagaaggagctgaaacgggagccagctgtgggggagcccgctgaggtcacgaccacggtgctggtgaggagagatcaccatggagccaatttctcgtgccgcactgaactggacctgcggccccaagggctggagctgtttgagaacacctcggccccctaccagctccagacctttggtgaggattgaagaagccagcagggagaaggtgggggtggggtatcctgcaatgcggtgcctgtggccacaggatcttttgagatgggtgtggccccggctaaggggtgcatgtgttctaggcgtatgtgacctaggctgctgagtggccctggaagaggatctcgcaggagggggaatgaaatgccccagagaagggcttcgggacgtccatccctgtctgctcacacctttcttctctccctagtcctgccagcgactcccccacaacttgtcagcccccgggtcctagaggtggacacgcaggggaccgtggtctgttccctggacgggctgttcccagtctcggaggcccaggtccacctggcactgggggaccagaggttgaaccccacagtcacctatggcaacgactccttctcggccaaggcctcagtcagtgtgaccgcagaggacgagggcacccagcggctgacgtgtgcagtaatactggggaaccagagccaggagacactgcagacagtgaccatctacagtaagaaggggcaggggcggagtggggcttcttgggggtgtgacctgaacccggggcggggctcactgtgtgcctattccaggctttccggcgcccaacgtgattctgacgaagccagaggtctcagaagggaccgaggtgacagtgaagtgtgaggcccaccctagagccaaggtgacgctgaatggggttccagcccagccactgggcccgagggcccagctcctgctgaaggccaccccagaggacaacgggcgcagcttctcctgctctgcaaccctggaggtggccggccagcttatacacaagaaccagacccgggagcttcgtgtcctgtgtgagtggggctgctggtcaatggcccctatcccccaaggcccaatctccctgaaggtcccataaggtcttgcctccaagtcctgcccccacccacctccatgtcatctcatcgtgtttttccagatggcccccgactggacgagagggattgtccgggaaactggacgtggccagaaaattcccagcagactccaatgtgccaggcttgggggaacccattgcccgagctcaagtgtctaaaggatggcactttcccactgcccatcggggaatcagtgactgtcactcgagatcttgagggcacctacctctgtcgggccaggagcactcaaggggaggtcacccgcaaggtgaccgtgaatgtgctctgtgagtgagccggcgggcagagctgggtgggggcaggggccatggacctaatgcaatcctcaccgcctgttgtatcctccccacagccccccggtatgagattgtcatcatcactgtggtagcagccgcagtcataatgggcactgcaggcctcagcacgtacctctataaccgccagcggaagatcaagaaatacagactacaacaggcccaaaaagggacccccatgaaaccgaacacacaagccacgcctccctgaacctatcccgggacagggcctcttcctcggccttcccatattggtggcagtggtgccacactgaacagagtggaagacatatgccatgcagctacacctaccggccctgggacgccggaggacagggcattgtcctcagtcagatacaacagcatttggggccatggtacctgcacacctaaaacactaggccacgcatctgatctgtagtcacatgactaagccaagaggaaggagcaagactcaagacatgattgatggatgttaaagtctagcctgatgagaggggaagtggtgggggagacatagccccaccatgaggacatacaactgggaaatactgaaacttgctgcctattgggtatgctgaggccccacagacttacagaagaagtggccctccatagacatgtgtagcatcaaaacacaaaggcccacacttcctgacggatgccagcttgggcactgctgtctactgaccccaacccttgatgatatgtatttattcatttgttattttaccagctatttattgagtgtcttttatgtaggctaaatgaacataggtctctggcctcacggagctcccagtcctaatcacattcaaggtcaccaggtacagttgtacaggttgtacactgcaggagagtgcctggcaaaaagatcaaatggggctgggacttctcattggccaacctgcctttccccagaaggagtgatttttctatcggcacaaaagcactatatggactggtaatggttacaggttcagagattacccagtgaggccttattcctcccttccccccaaaactgacacctttgttagccacctccccacccacatacatttctgccagtgttcacaatgacactcagcggtcatgtctggacatgagtgcccagggaatatgcccaagctatgccttgtcctcttgtcctgtttgcatttcactgggagcttgcactatgcagctccagtttcctgcagtgatcagggtcctgcaagcagtggggaagggggccaaggtattggaggactccctcccagctttggaagcctcatccgcgtgtgtgtgtgtgtgtatgtgtagacaagctctcgctctgtcacccaggctggagtgcagtggtgcaatcatggttcactgcagtcttgaccttttgggctcaagtgatcctcccacctcagcctcctgagtagctgggaccataggctcacaacaccacacctggcaaatttgattttttttttttttccagagacggggtctcgcaacattgcccagacttcctttgtgttagttaataaagctttctcaactgcc

SEQ ID NO: 137 - DNA, 7407 bp, Homo sapiens
gcagacacctgggctgagacatacaggacagagcatggatcgcctacagactgcactcctggttgtcctcgtcctccttgctgtggcgcttcaagcaactgaggcaggtgaggctggggagcaggaagaccccctacagaggccagggcagacggtggggtgtcttcctcatgtcttggacaagcactggaccaagagcagaagacctcagtctgctgttggctcttgcggccttcggctagttgcagtgcttctctgggcctcagtttacaagtctgttgaatgggcagtcttgaagacttggagtctaggatctgtctcacctgggttgggggttgtggtgggcatagcctcgggatctcctgccccagaaaactcaagcatagggccctaggggtgtgggtgaggagcttctaagggtcaggtctgagtgggggaaggcagggctggggcaaggggttctcccttggaaagctggtgctgccctcccaccatccattttttaaaatgttattattattattttttattttattttattttattttttgagacacagtttcactcttgttgcccaggatggagtgcagtggggcaatcttggcccactgcaacctctacctcccaggttcaagcgattctcctgcctcagcctcctgagtagctgggattacaggcatgcaccaccacacctggctaatttttgtatttttagtggagacagggtttcaccatgttggccaggctggtctcaaactcctgacctcagatgatcctcccacctcagcctcccaaagtgctgggattacaggcatgagccactgcgtctagcctaaatttattttttatttcattttatttatttattttttgagatggagtctctgttgcccaggctggagtgcagtggcgcaatctcagctcactgcaacctccacctctggagttaaagtgattctcctgcctcagcctcctgagtagctgggattacaggcacctgccaccatgcccggctaatttttgtatttttagtaaagatggggtttcaccatgctgaccggtcttgtctcgaactcctgacctcaagtgaaactcccatcttggcctccctaagtgttaggattacaggcgtgagccactgctctgggctcactatccatttttgtccagaacctgtcctcagcatggattcctgactcctcttctccaccccactctatacttttgctgtgttgggtggaggagtgagcactggagtggggtcaggcagctataaacaagaattgctcccagctgctgggctttctgagtgcttttcatgcattaaagaccctctgaagctggtactgttattacccctttggtcagaggaggaaattgggcctcaggctacagctgatgcttagttgttctgaatccccgctcctagagctgactgtcccagagtgtagacattggaccctaagtggcttctcagaagctccaagggtagggtcttggagggctcagaatcctctggtcaccatccttccacatgagaacagaaaaactgcatctctttcctggagcctggagaggccgagatcaggggctggggccgagggtgacctctctgggctccagcttgtgaattcactggggacccctcccctaggcccctacggcgccaacatggaagacagcgtctgctgccgtgattacgtccgttaccgtctgcccctgcgcgtggtgaaacacttctactggacctcagactcctgcccgaggcctggcgtggtgtgagtagggagctggggccacagggccttggtgggcctgacgggtacagcctgggatggcccaggtgctggtgggtgggacacacccagggatgagaggaatgtggcagggctaccagatgcctgccaggatggcttggctggaagagatggctcagttcaggcttgggtggactacaaacaaaaataatgtgatcgtttagccaatatcctcaggcgcttactaggtgccaggcaacatgtcaggttctgaggatgcagagctgagtgaacagggtgccaccacagtgtgggtatggcagtaggtagtcagtagctgtggcatctagggtatttgggtatagcaggtataggagtatacctagtgccactgagtcagcaaagatgctcccaggttctgggcaaaaatggatggtgaaccaggcgtggtggctcatgcctgtaatcccagcactttgggaggccgaggcaggcagatcacttgaggtcaggagttcaagatcagcctggtcaacatggtgaaaccccatctctactaaaaatacaaaattagctgagtgtgatggtgcgtgcctgtggtcccagctacttgggaggctgaggcaggagaatcatttgaacctggaaggtggaggttgcagtgagccgagatcgctccacctcactccagcctgggcaacagagggagactctgtctcaaaaaaaaaaaaaaaaaaaaaatgctcacaccagaagtgtcttggatcctctccaggctcccagaagtccaaggcagcccattttgaccagaagaataacattaagagctaaaatttccaaggtgcctcccgagtgccaggcactgttctgatcattacctgtgttaactggtttaattctcacaacaatcctacgaggaagttcaacgattcccatggtagagatggagaaacaggcttagcaagggacagtgacctgctcaaggctgcccaggttggagccagaactcactcctggttcctcgttcagggctttctcctgagtttcttgttctcctttgcttctttctctggcttctttgcctccttttccctggcctggggcctgcacctgcacctggctgggtgacaagtcctgccctctctgcggtagcctctctggctgcttctccaactgctcagagcctgctgcctaccaaatctcacacctggggaggctgggtttggggactcatgacccactttgggcctctattatcttctcatcttcctcctccttattgctgacaccatctcttagagggatctgcaggtgaataataaaaaaggctgaagcaggaagccctcccagagttcttgtctctttaactctgagcctcagtttccccaacagtataatgaagtaataacctaaacttatttgacttatttgtatttatcaaacacatagagagtgcttgctaagtgctaggctctgccgtaagcactttataaatatgaactcatttaatccttgaaacaatcctatgcagtaggtgccatcgtgacccccttttcacaggtgaggaaatgagcacaaaaaggttagggggcctcttgagcattacagggcacagtaatagtaagaggaaggtgaagagctcaatgtctggcacataatagatgctcaattgctgggcatgtagtgcttctcagttacttgggaggctgaggcaggaggatttcctgagccctggattttgaggccagcctggaaacttactgagactctgtctttatttcatttttttaaataaaaaaggctgagtgcagtggcttacacctgtaatctcaggactttgggaggctgagttgggaggatcacttgaggccaggagttcaagacaagcctcaatagagtgagaccctgtctctaaaatcaatcaatcaatcaatcaaatcatatgtgatcactggattttgagccagaagggaccctagaaagaatgtgtctggaggctcagagtagttaagtgatattataagactcttggggattctggcttggcgcagtggctcactcctataatcctagcctttgggaggccgagacaggcaggatcacttgaggtcagaagttcaagagcagcctggccaacatggtgaaaacctatctctactaaaaatacaaaaattagctgggtgttgtggcgggcacctgtaatcccggctactcgggagcctgaggcaggaggatcgcctgaacccaggagttggaggttgcagtgagccaagatcgtaccactacactccagcctgggtgacagagactccatctcaaaaaataaaaacaaaacaaaacaaaacaaaaacaaaaacaaaacccaactcttggggattctatttcatggcctgatctggaactcaaggctgggattcaagagctgagggtcctggaagtccttgctgcctcttcctctttttttttttcttgacacggggtctcattctgttgcctaggctggagtacagtggagcagagatctgggctcactgcagccttgacctcctgagtccaagcaatcctcccacctcagcctcccaagtagctgagatcacaggcagatgtcaccatgcctggctgacttgtacgtttttgtagagacagggttttgccatgttgcccaggatggccttaaacccctaggctcaaacaatcctcctgcctcggcctcccaaagtgctgggattacaggcgtgaactcctggcctcctcttcctcctgagaaatattcttttcacaccacaggtggcttgtaaattttgaaccactctatttagcagataatgtcatatgtagtaggtgactcataaatgctgagccctgcataaagtaggtggctcataaatgctaagctcccgagggtgtggcatccttgctgcgtgctaatgttgctgcattgtctctggggtctccttcttccaggttgctaaccttcagggataaggagatctgtgccgatcccagagtgccctgggtgaagatgattctcaataagctgagccaatgaagagcctactctgatgaccgtggccttggctcctccaggaaggctcaggagccctacctccctgccattatagctgctccccgccagaagcctgtgccaactctctgcattccctgatctccatccctgtggctgtcacccttggtcacctccgtgctgtcactgccatctcccccctgacccctctaacccatcctctgcctccctccctgcagtcagagggtcctgttcccatcagcgattcccctgcttaaacccttccatgactccccactgccctaagctgaggtcagtctcccaagcctggcatgtggccctctggatctgggttccatctctgtctccagcctgcccacttcccttcatgaatgttgggttctagctccctgttctccaaacccatactacacatcccacttctgggtctttgcctgggatgttgctgacacccagaaagtcccaccacctgcacatgtgtagccccaccagccctccaaggcattgctcgcccaagcagctggtaattccatttcatgtattagatgtcccctggccctctgtcccctcttaataaccctagtcacagtctccgcagattcttgggatttgggggttttctcccccacctctccactagttggaccaaggtttctagctaagttactctagtctccaagcctctagcatagagcactgcagacaggccctggctcagaatcagagcccagaaagtggctgcagacaaaatcaataaaactaatgtccctcccctctccctgccaaaaggcagttacatatcaatacagagactcaaggtcactagaaatgggccagctgggtcaatgtgaagccccaaatttgcccagattcacctttcttcccccactccctttttttttttttttttgagatggagtttcgctcttgtcacccacgctggagtgcaatggtgtggtcttggcttattgaagcctctgcctcctgggttcaagtgattctcttgcctcagcctcctgagtagctgggattacaggttcctgctaccacgcccagctaatttttgtatttttagtagagacgaggcttcaccatgttggccaggctggtctcgaactcctgtcctcaggtaatccgcccacctcagcctcccaaagtgctgggattacaggcgtgagccacagtgcctggcctcttccctctccccaccccccccccaacttttttttttttttatggcagggtctcactctgtcgcccaggctggagtgcagtggcgtgatctcggctcactacaacctcgacctcctgggttcaagcgattctcccaccccagcctcccaagtagctgggattacaggtgtgtgccactacggctggctaatttttgtatttttagtagagacaggtttcaccatattggccaggctggtcttgaactcctgacctcaagtgatccaccttccttgtgctcccaaagtgctgagattacaggcgtgagctatcacacccagcctccccctttttttcctaataggagactcctgtacctttcttcgttttacctatgtgtcgtgtctgcttacatttccttctcccctcaggctttttttgggtggtcctccaacctccaatacccaggcctggcctcttcagagtaccccccattccactttccctgcctccttccttaaatagctgacaatcaaattcatgctatggtgtgaaagactacctttgacttggtattataagctggagttatatatgtatttgaaaacagagtaaatacttaagaggccaaatagatgaatggaagaattttaggaactgtgagagggggacaaggtggagctttcctggccctgggaggaagctggctgtggtagcgtagcgctctctctctctgtctgtggcaggaggcaaagagtagggtgtaattgagtgaaggaatcctgggtagagaccattctcaggtggttgggccaggctaaagactgggatttgggtctatctatgcctttctggctgatttttgtagagacggggttttgccatgttacccaggctggtctcaaactcctgggctcaagcgatcctcctggctcagcctcccaaagtgctgggattacaggcgtgagtcactgcgcctggcttcctcttcctcttgagaaatattcttttcatacagcaagtatgggacagcagtgtcccaggtaaaggacataaatgttacaagtgtctggtcctttctgagggaggctggtgccgctctgcagggtatttgaacctgtggaattggaggaggccatttcactccctgaacccagcctgacaaatcacagtgagaatgttcaccttataggcttgctgtggggctcaggttgaaagtgtggggagtgacactgcctaggcatccagctcagtgtcatccagggcctgtgtccctcccgaacccagggtcaacctgcctaccacaggcactagaaggacgaatctgcctactgcccatgaacggggccctcaagcgtcctgggatctccttctccctcctgtcctgtccttgcccctcaggactgctggaaaataaatcctttaaaatag

SEQ ID NO: 138 - DNA, 1150 bp, Homo sapiens
gtagagttagaaaaacatgaaccattaacagatgtggcctccctgcagaacttttactttgaaaaagaagtacgtctgaaccagattcacatgtttgatatttggatgcagagaaaatggggcagaaagcatcgcaacagttggctctgaaggacagcaaagaggtgcccgtcgtctgtgaggtggtcagtgaagctatagtccatgcagctcagaaactgaaggagtaccttggatttgaatatcctccaagtaaactctgcccagctgcaaatactctgaatgagatcttcttaatccatttcatcactttctgccaagaaaagggagttgatgagtggctgaccaccaccaagatgaccaagcaccaagccttcctgtttggtgcagactggatttggaccttttggggatccaacaagcaaataaagcttcagctcgcagtacagactctgcagatgtcttcacctcctcctgtggaatctaagccttgtgacctttccaatccagaatcaagggtagaggagtcttcctggaagaaaagtagatttgataagctggaagaattctgtaacttaataggagaggattgcctgggtctgtttatcatctttggtatgccaggaaagcctaaagacatcaggggagttgtcctggacagtgtcaaaagtcagatggtgaggagccatctgccaggagggaaggctgtggctcagtttgtcctggaaactgaagattgtgtgttcatcaaagagctgctcagaaattgtctgagtaagaaagacgggctgagagaggtgggcaaggtttatatcagcattctctgacttggatatgtattatgtgagtggcctgtaagaggaaaagaaaaaaagattctaataagcaagctcacctatttgcatcattccagcatgggattttttttcatttgttttcccattgattgaaaatgattactgggatcaaagtacattcatgtcgcaattacagagagagagagaaaaaaagaaaaccctggctctgcctatgatttaaaaacagttcaggaaaagttataatttagtttaatatttcattcacttattcaataataaaaatggaagagagataataaagtcacatttaaagtttgatttgcaaaaaaaaa

SEQ ID NO: 139 - DNA, 109160 bp, Homo sapiens
gtctgcagccagcgattcggctggctctgccacaccaccgcgcgcccccgctccgcccgcccctccgggcgcgtcttttccgggctcgcgctgagtcccgcctccgccggctgtccgggtgcgcgcgcgccgctgcggctttttctctggcctccgccgcgcgctcctcctcgtcccagcgctagcgggcacgcggttcctttttgcgagctttccgagtgccaggcgccggccggctgcgaagacgcggtgggccgcccctccggtgagtatccctggatggggaggttgcggccccggcacccctgccctgtcggtaccagggccccatttccagagggggactggcgtacctcacctgagccgggaggaggttgggtgggcattccagctcctggagtcggctcgcttttttccttgagccagggctatctatccgctcgcctccgctggggccgggaagattcccgaggtcactgtatctgctcctgtgatggactctggggtcctcggaaccccagcctgcctcttcctgccgctcaccgcatcccgagggccagaagtcatcttcctgatcggggtactaggctttgccacggccctttccggaggagaccatgaagtgcttgctagacctccaaacgacctttagggtgcccctaaacctcaactccattttgtcccctcccagtcgctctgtaactgagggctagggagcctctctagccctagaggcatccgccctctcgaatttgagggatgccgtcgcttccgatatcttccttgcttccgatatcttcctagcttccgtaggcttaggtttgttagaaaacagctggatcctggcgaagcgtgctttccttccttcccccacccccgttctttctgtctacatccctgccttcagtgggtgctatatatttagtatgagctttattcacttcctcttcctctcgtttgagtgcctgaaagaactgtggctgatgtctatagacatagaaaaatctaggagaatatgattcattgtctaaccccatcaaggggttacatattttaaataagacgtcatttctcctcttcactccagcatctcctccttcaaaggcatttttcaccctcttgaaattaatacgctctattcgctcttttcacctaaaaaaaggtcaatcgtcgctctgagaaacaacagtgagatgcaaaataagggtaaaatggcattgaaatgaatccctttgaaaaagtaagcggtttgctttatcagttaatggtctcatcagcgcttcagtttcctcttctgcaaaaatcagtctgttgaactagagcatatcaaaggttccttctagtgttttgattctaggacctctaaattcatgcaggctgcataatgcaaatttaacctgattaaagccttatttctcatagtcgcttgtcaccttagtttttcttttattttgtctctaacaagaaagacttttaaatgttcttgatacgtaaggcagcaggtggagattcaatgatggtactgccattgagcatatcggtcaagattttaacagtgtaaggcctcttccttaaattgtaaaatagctcatcttttgattgaaactgctaaagtgtaagacatgtaagactcctgttagaattaacactctctgccatttaggtgggggatgaaacattaaactgttagtatacttgtaccttagaataaagtaccttattgtcctgctataagaaataatttgacaactaaaaatccatggaaggtgtaatacagcaattgaaagcttgagtaaattcaattttgtgggtttttttttttttttggaaaaccccctatttaaaaacacaagtgatttagattaagatatttctttcagtatttttggtaggggtgagatgggtgaagaaagaagagtcttgttcaattcagacaagagaaatgaattggaactctggagaggctcaggttctagacccaactctagatatatatttaaccttgaacaagtcacttcacctctcttagtttttgcatctgtaaaataagtgtctttatggttgttgaaatgatccacaagtcccccaatttgaatgatatattcttataatgaatatatatgacaaatatatatatacacacgtgtatatataggtatacacacacacatataatgcaatttgcgttaaggctgttataaatcctgttataccagttgactagaatgtttttctcaaaggtttgtgtatagtggtttcaatttaggtatacttagttcttaatcctgattaaataaataattatatgtgaaaatctataaactcagaagcattttacaaatgttgggtattatgttaatttctgcttgcaagtgaaatgtgtgttataccgcactattttttaaatgtccatggcttttagaaatttataagggaatggctgggtgtggtggctcacgcctgtaatcctagcactttgggaggccgaggccggcggatcatgaggtcaggagatcgagaccatcctggctaatacggtggaaccccgtctctactaaaaatacaaaaaattagccaggcgtggtggtgggtgactgtagtcccagctacttgggaggctgaggcagaagaatggcgtgaacccggaaggtggagcttgcagtgagccgagatcgcgccaccgcactcacatactgccttacaactgtaattggctaggaactttaaaataatatgtgggcatctcattcatttattaattcattcaactatcttcttccttcatctgtcacgtatgtcaggccctcaggacatgatggttaagacaaaccctactctatgagtttatactttgggctgatggagatggttggggggcatgtggagagacagatgtacatccagtttatttttgttaaaaacaacaacagtcaaatcaaggacaaacaaaattctggagaagttaagtttccataggggaggaagagatgattctattaattgtagcctgtagactctttgacattacctttttctccatcctttcaattgctgagcctttagcaaaaataaaagctttgtttttccacttctaccattggctggtcttatatactctttctttcccttttaactttttattttgagatagttgtagattcacatatagttgtaagaaataatacgctttatctaatttcccccaataatagcctcatgcataagtatagtgtaacatcacaactacaaaattgaaatcgatgcaatccatcaaccttactcagatttcgtcacctttaatgcagtcatttgcatgtatgtatttagttctacataatgttatcacgtgtagatttatataagcactaccacagtcaagatacagaacaattgcatcaccacaaggatcctttttgttgtctttttatagatgtagccatctcccttcatccctgactcctggcaaccactgatctgtttttcatgtctataattttgtcatttcaaaaatgcttatataaatgaatcacacagtatataacctttggagactgactttacttcactcagcataattccttggagattagtgcaaggaatataccttttatcaatggcttgttcctttccattgctgagtagtattccataatatggatttactgcagtttgtttaaccagtcacctcttgaagggcatctgatgtttccagggtttttgtttgttttacttatttatttatttatttattgcctattttgaataaagctcatatgaacagttgtccacaggattttgtgtgaacataaatttctgaaatgcctgagagtgtacttcttgggtggtatagcacttgcatgtttagttttctaaggaactgccaaaccattttccagagtggctgtaccattttacattcccaccaggaatgtgtgaatgctcctcatccttgacagcatttggtgctgttactattttttattttagccattctcataggtgtgtagtaatatatcctcctagttttaatttgcatttttctgatcgccaatgatgttgatcatttttccatgtgtttatttgccattctctgtatcttcagtgaaatatcagttcatgtcttttgtccattttctatttggattttttttttaacctggtgagttttaagagttttttattatttttttgagacggagtctcgctctgttgcccaggctggagtgcagtggtgcaatctcactgcaagctctgcctcccagattcacgccattctcctgcctcagcctcccaagtatctgggactacaggcacccgccaccacacctggctaatttttttttttttttgtatttttagtagagacagggtttcaccgtgttagccagggtggtctcgatctcctgacctcatgatccacccgcctcggcctcccaaagtgctgggattacaggcgtgagccaccgcccctggcctttttattcttaatactaatcatttgtcaggtagtggtatgaaaatatgttctcccagtctgtagcttgtctttccaacctcttcacagggaatttcacagagcaaaaggctttaatttggatgaggtccagtttattaatttttcctctatggactgtgcttttggtgtcaagaaatcttacaaacttttgttatttaatttgattcctttctgttctgtataacatccattatttctgtaagctatttgagcattttctctttcaacaattttagagctcaaatatattctgtgaacaagtggccttaatggcttagaatgttaatacatattcacacatgctctcactatattaaaatggctgccttaaaaatataatgtctacctcaccaggctgtcaaatgcaacattaaaatttgtattttaaaattaaatagacgcatgatatgctaaagaggtttttggtttcactttctaaattaaaaatattttggcaaaactgtatcattttccatcaaggattttggtaagtaatccaaaaaacaaatttgtgttcttatttaaatgtactttgaaagtctacttctgcattttgagtagtgaagttatgattcatgaccatgtatttagcagacttttctactcactgttgattatgagaataatgaataaaagatcattgtatttgactgtctagactgcatttttccttttatagcagctacatgacactcattgtaactgtcttttgaaataaatattaggttcaaggtgatgtttacagttttatattttgaaaaatgtatgtgctcatatgagaaggaattataggaaaaggttagtgattaattttgagaatattcatttctgtaaggcagtactgaaattatttgtcccttcagtgttactatatttactcaaatatgtgtgcagtgagggaagtagattgttatttgaaaaagataaaacattggtataaggcaggggctggcaaaatactgcctgtggccaaatcctgcccaccaccggtttttgtaaataaacttctcttggaatatagccacatccattaatttatgtgttttctggccgcattcacaatacaacatcagagctgaaacagagcccttatgtcccgtgaagccaattttctctctggacctttacagaaaaagtgctgaccccagagataaggtaaccttataaattgttgattacacacacacacacacacacacacacacacacacacacacacacacacacacaatttaacaaactaccctgactttttataccttctggttacatttccaggtgatattgtgattcaggagagtgcattcattttctttactaagtctccaaagcactgtggtctaggagcagcaataaggaatgcatagagagttgagacggttgattttgttgttaagtgtgggttatttaaatgtgaatgtgaatttacatgtgtggcaatcagtaagctgcagatagacttctatgcagtctatgatgtcttttggagaccctgttgtgagctgtagcggtaataagagagccaggcatggtagtgtttttgctcctgaaactgctatgtgatctttaagtacatagtagtaagagcctatcaaactgagcttagactgttggtttattattttgtttgtacaacttccttttttataacgaagcagttgacactttagttcttttaagtgttctaagtgtaatgttgaaaatggaaattgagtaaagacaggtggctgtgtatttagaaagtaataagtctccatctctcatcatacacaaaaataacttaagaatatattttaaaaatctaagtatatattttaaaaaatcttctggaaagtgtaagacatcataacccagttaaaaagacaagtgatggccgggcactgcagctcacgcctataatcccagcactttgggaggccaaggtgggaagattgcttgagcccaggagtttgagaccagcctggacaacatagtgagaccctgtctctaaaaaaaaaacaaaaaaaacaaaacaacaacaacaacaacaaaaaacaacaaaaaaagccaggcatggtggcatgtgcctgtagtctttgctactccagaggctgaagtgggaggatcccttgagcctgggaggtcgaggctgcagagagctatgattgcaccactgcactctggcctgggtgatagagcgagaccctgtctcaaaaaataaataaataaaataaataaaaatgaaaaagcttctacatatgcattagaagctttaattgacctccacttaattgactcaccacattgaataatttttatttcctttgtaaaatacagtgtacactgaatacttggtattagttggttgatctccagtactccagcgtgcttgtttacctaccagtacagtaaatttttttactactaaacctgtatatgttggttgtatttgtttttttgtttgttggttggtttgtttgtttttgagatggagttttgctcttgttgcccaggctggagtgcaatggtgcaatctcggctcactgcaacctctgcctcctgggttcaagcaattctcctgccttagcctcccgagtagctgggattataggtgcccaccaccatgcctggctaattttttttgtatttttagtagagacggggttttgccatgttggccaggctggtcttgaactcctgacctcaggtgatccacttgcctcagcctcccagaatgctgggattacaggcgtgagccaccgtgctaagcctgcttgtatttgtttttaaaaggtaatttgtttaatatgttgtaacctgacaatatatgagtgggggagattggagttctttttactgaaaatttacaaatgaaataatatgatgtctgggatttgcttaacattatacaaggggtgagggatggaggtgggttgtgggtagtatggaagaaacacaattcagcacatatgaataactgttgaagctgggtgatggttacattagattcattatgatgaaacaaattgttttgagaagagttaatgaaaacaagttgcaaaaaaaaatactgtccgcttaaatgtgggtaagatgactatacaagatacgtggaaaaaatataaaaatctaaaagagttttattttattttattttattttattttttgagatggagtctcgctcttttgcccaggctggagtgcagtggcgtgatctcggctcactgtaagctccacctcccgggttcacgccattctcctgactacaggcgccctccaccacacctggctaatttttttgtatttttagtagagacagggtttcaccgtgttagccaggatggtctcgatctcctgacctcgtgatccgcccgccttggcctcccagagtgctggggttataggtgtgagccaccgcaccagccatctaaaagggttttatactcacattacttgtcaaatgtaaaatcaatgggcctggagttagagaaaaaggtcttggcctcttggccccatatagaaagtttgaggctggcatggtggctcatgcttgtaatcccaacattttagggggccaaagcaggaggattgcttgaagccagttcaagaccagcctgagcaacatagcaagaccctgtctcaaaaaaaaaaaaaaaaaatagctgggtgtggtggcacacacctgtagtccccagtcactcaggaggctgagacaggaggattgcttgaggccaggagttcaaggttgcagtgagtcatgatcacaccactgcattccaacctgggagacagagtgagatcctgtctttaaataaaaaaacaaaacaaaacaaaaacaaaaaaaaccccaggtcaggtacagtgcgtcatgcctgtaatcccagcactttggaaggccaaggcaggcagatctcttgaggccaggagtttgagaccagcctgggcaacatggtgaaaccccatctctacagaaaatttttattattattattattgagacggaatctcgctctgtcgcccaggctggagtgcagtggcatgatctcggctcactacaacctccgtctcacagattcaagcgattcttctgcctcagccacccgagtagctgggattacaggtgcccaccaccacacccggctaatttttgtatttttagtagagatgaggtttcgccatgttggccaggctggtctcaaactcctgacctcaagtgatctgcctgcctcagcttcccaaagtgctgagactacaggcgtgagccaccacgcctagcccaaaaaatacaaaaatttagttgggcatggtgccatgtgcctatggttccaactactggggaagctgaggtgggaggattgcttgagcccagtaggtggaggttgtagtgaactatgatcactcacgtcattgcattccaccctgggtgacagagtgagaccttgtctcaaaaaaacaaaaacaaaaattagccaggcatggtgatgcacaactgtagtcccagatacttgggaggctgtggcaggaggatagcttgtgcccgggaggcagaggttgcagcgatccaaggtcactccactgcattccagcctgggcatcagagcaaaaccctgtctcagaaacaaacaaaaaaacaaaaaagccccccaaaaataaataaaccaaaaccacacacacacaaagtttgttgaatgagtatatatataccactgatgaaaggaaggtgaaatgtttgccatacatatttttatgatcgtttacctgaaattaaccttttaaattacataaccaattgttctaaatcacattagataaaagggtttctactgcataatatccataatatataaagagctcctaaagatcaataagagaaaggtacccactacaaaaagcaaaaagtggcagaagattatacatgggcatttcccaggaaaagaagtactggtgaataaaaaagaaaagatgttcaaattgactctggttattagggaaatgtaaaccgtttttcaccagacagattggcaagaacttaatatccacttttaacaaataggcatttgcatacactgttaatgagagttcacatgtataactctttgctgaagaataccaaaatcatctcatttttaaatgtgcatacattttgacccaatagttttattagaaaacaattctagggaaatattacatgtgtataaaactatgtataaggtttcgctgcagtgaaactgtttgtaactgtgaaaatttggcagtatcctaaatatccatcagtagggaatgatttaaataatggtaagttatactgtggaataccattgagttattaaataaaaaaagaagaaaagcctcttggttagacatatatatacactgacataggagttccaaagtatgctgttaagcaggggaagagagggggagggagtcaaagaacagttgtataccataattccacttatctaaaaataaacccttatcatgtgtatgggtaatacaaaacaatctgattgatacacatcaagagtaattatccctagaggaaaagagagtggtgttagaggagggcagtatagttttactttttctctgtacaattctatattatatattataatttacaattacaattttgatagtaggtatgcagattactattatagcaaaatacaattactattttgatagtaggtatgcagattactaatattaaacatttgcacactggaggatgcttataataggattccttcattctacaacaacactctactgtaaatgtaattaatgccttgtactgaacactcaggtttttaaaaaaatgatgttttctgctatcgatgaagtattggtattttctaaatttttgacaccaaaaatataagtataaaaaagaataaaaacagtaatttcatacccagaaacatccattgtcaactttttggtatatatgcttgtgcttatatgtatggacacttgcatgcacatgtgcacacatatatcacctttctacaaaaatgggtttttactgtacatactgatttgtaacttgcttgtttaactcgacactatattgtgagcatcttgcagcatcagtaactccgagtaagtgaaaaagacatctggtgggaaaaggccaacatcgtgccatgtaaatacagtgttttagttaaaataactggtttctaggacaaaccagaattaaaaaaaaaaaaaagtcatggtcaccaaagtaaataaccaaggaattttaaagtctttaatgttgagtcagttcagttctgttttgaatttaactatgaacatgttatttacagtgtagttatcaatgatgatgtaaaagtgcaatatattaaaatatcattaggaagctttttttgggtggagtttgattttagcgaagaattaaacactgaacctgaatggttatttttgttcaaagaaaaaccaactgctgtggctagtttttggtagaggtgtgtgtagttgtattcttttgcaacttataaaagtaaagaaaatctaggtatctgtggcaacataacctttttctatgatatctcagtttgtagtttatcaaattgattattaggagaactgtgtcagagaattaagtttgatttgggcaagtatgtgtgtatgctactttctcttgtcatctagaagtatttgttaaacaaatttgctgaagacccattataatttcctctgggtttatgctgtaggacttagaggtgaaaatatcttacttttgttgaagggtttttgttacttactattttccatgaattcaacagtgcattttacaaaacaagattctacctggtagacaatggtgttaatgtgaaggcccaacatagctatactcaggtttttattatgatgattgaaacagtgtccctattctccaaagccatttaggcctttttggaattgatttcacagtacagaggattttaggtgctatcaagttagcagattttaaagggaatcaggatagagtttctctatttctcacttagttaatgagagggcatgtgagattgaacttttacagaggcattgaaaatgttaatggtggattcttgtggtagttatgaggttaatggagtggggaggtatggtgaaataactgtttcttcttttttcttttcttttcttttttgtttttttttttgacggagtcttactctgtcacccaggctggagtgcagtggcaggatctcgcctcactgcaacctctgcctcccaggttcaagcgattctcctgcctcagcctcccgagtagctggaactacaggcatgcactaccacgcctggctaatttttgtatttttagtagagatggggtttcaccatgttggcccggctggtctcgaacttctgacctcaggtgatccgcctgccttggtctcccagagtgctgggattataggcatgagccaccacgcctggcccctgttttttcttaggtattctgttttattacctttaatgtggactttaagtattttaatactataaataatgatagggttttgtacgaccaactctcctggggaatacctgaatgatgttttatcaaagaaaacctggagaaataggcagagctgccctgctaagatggtgaaaattcactgtgcttcaggatatgttagtaatttctgctttccagatgaactgaaaactgaaaactccctcagtcaggagacaggaacttggtgaatgagcataaaattcagtcatggttttgagaagaaaaagaagaactagcactaataccacatgggatgaatccaagtaaaagatctatgttccacatgacgactgaaagttgagaagcagcttcaaagaacagttgaaaaatcacaactttactgaagggtagaactcggcagaaatagctgtagcaattgttagatgaatatgtttcagacaaacagagcagaaaagagaagagaaggcctaggataatgatatttcttcacctggaaccatggaaactttcccgatttggtcaacagtcaattgcaaggttagtctaggacggtttaaagtctttagtggaatatttcgggttcagaaagtgtcagcaagcaaagcaaagacccattttggaaggcattggggtcccttctgtacctagacaattccttataggagtaggttagaatttctgtgaagcaagttgtttttctataacctggaaactacaaaaggcagggctcaggcacactgtattggtgaattatagcaacctgtagatgggaagctgtgtagtttttttatttcttcaagtagaaatgtgagtattagcacattcattcaaatagagttacatgttataaatttttaagcaaaataactgacctaagtatgttatacagctcaaatttccccccagaaaattttggactgttttactaagattttagtttttagtgtcaagtattaaggccaggatttttatgtggaagcaggtttttaaaaatttatatacacattgacttaattttaacatcctcttgatcatcaagagattaagtatttaaatgtttgtaggaaagtagcttttttttttttgagtctcgctctgttgcctaggctggagtgcagtggcgtgatctcggctcactgcaatctctgcctcctgggttcaagtgattctcctgcctcagcctcccgagtagctgggattacaggcctgtgccaccacgcccagctaatttttgtatttttagtagaattactaaaaattactaaaattacatgttggccaggctggtcacaaactcctgacctcaagtgatctacctgccttggccttccaaagtgctgggattacaagcctgtgccaccatgcctggccaggaaactagcttttttgtttttgtttgtttgtttgttttttgtgagatggagttttgctcttgttgcccaggctggagtgcaatggcacgatctcagctcatctcaacctccgcctcccgggttcaagcgattctcttgcctcagcctccttagtagctgggattacaggcatgagccgtcatgcctggctaattttctatttttagtagagacagggtttctccatgttggtcaggctggtctcgaactcccgaactcccgacctcaggtgatccacccacgtcagcctcccaaagtgctgggattacaggcgtgagccaccacgcccggcggaaagtagctttttaaaggaaacattcccccaaagaattgacttcattataggtggtatcccttaaaatacagactgtttcagaagaggcagcagcagaatgaaaactttcatggtgaattccccaccttctattttattcctgttttgaaatggagttccccaacatcaccattacagctcagccatatctttgcatttctttgtggacttagttagaactgaatgattgatgattttcagcgcgaggagtacaaaataggggagttgatacttgcatcagccctgctagctgccttgaatcctagctcagtaggggtcactcttaagctgccataggcataacaacttctacataggtggcacttctggcactttggagaacattctagtggtgggatagttccctaacccctgtcttatctctgtggtaccctgcatctatgccatttttgtttggttacataaaatgtttctgtggagtgattggcctatgattgcattgataacatttagtaaaacagaagatttgttcctaacacgttttacagagctgatctttttattgaaaaatccctaaccctaaagaccacagttttttgtttgtttattttgtttgttagcctcatagggataaagtgcttccttataatcttgtttccaattgtcttcaactgaggaagaggaagtctgttgactgtctccctgcaccccctctgattgaaggatcaccttgcttagggcactgccagcttaaaagtggaggtggatgccatactaggacattaccaaagatgaggaggagtggcagtgaacttagagtctatagccagagtgtacattgaattttaaaaaccaataatctgagatctagtctgtacttaagagacatatttaaacaacaaattgtagactatgggatttcttttctttctttttttttttttttttttcttgagacagggtttcacttctttcacccaagtgcaatggtgtgacctcggctcactgcaacctccaccttctgggctcaagcaatcctcccacataagcatcctaagtactgggaccacaagctcatgccaccatgcccagttaatttttgtattttttgtagagacagggttttgccatgttgctcaggcaggtctccaacttgtgagctcaagcagtttgcctgcctcagtctcccaaaatgttgggattacatgagtaagccactgcgcctggctgactatgggatttcttaagctaagtagtatattgaaaagtctgcagtgtttcatttgatgatcagtctccagtgaaaatctgcaaaattgagtcaaaactgaatttgtctttcaaagttgggattattgttatataacactttcatggtacttaatgacttcagtgagatgtaagtaacacattttgaagcagctcacttcggttgaaagaattatttttcaacctggagttgatttcttcaatttcgcatcattcctagcaaattgtaacattaaggtcatattatttgtccagtcttttctaaatgctgtaacgttttgtcatgaaatcatgggaaaatgttacttttgcattgtgaggagtgagtaggaatttgtttaggacagaaaaccaaatcttagaattgtggactttgcttatgacttctacctctttagttaaaatcaaagttgcgcagttacctgtttgagttgcataaaacagttctgtgggatgatcctctcaaccatggttatccagccttttggcttccctggaccatgttggaagaagaattgtcttgggctacacataaaatatgctaacactaatgataactcatgagcttaaaaaaaaaaattaaaggtgtatacataattttcacgatatctaccaccagagataagcaaaaatgtcctcgcattcaaagggttggacacggctgtgagtataaactattggaaattgtgttgagtttgatttttggccagggttagggccatgtcctgctattgccagaccatttttttcccttgctcttaccggcactgccccattgctgcagaaagaccaggatgctgtctgggcttggcacaaggctctgaacctcaatgtcattcccttctactttcaggcattagcagccctgaaaaccataagatggggctgttaaaagcattttgaaattaatcttttcttgttctttttttttgttttgagatggagttttgttcttgtcacccaggctggagtgcaatggcgctatctgggctcactgcaacctccatctcctgagttcaagcaattctcctgcctcagcctccctagtaggtgggattacaggtgcccgccaccttgcccaggtaattttttgtatttttagtagagacggggtttcaccatgttggtcaggttggtcttgaactactgaccttaggtgatccgtccgcctcggcctcccaaagtgctgagattacaggtgtgagccaatcttttcttattcttaaaaaaaaatcaggcttgtaagacgcggtcacatagccatcaatcagagttaaagatgtatggtaagagagaacaggtttgttttcaaaactgtcctctgtgttggccttagttttgcctttgatgaaaaagcaaactaccctcttatattttattgctattcatattggttgcagatgcttcaaggaggattgaattactgcctagtttaaaggtgatatatcttaaataatcatagaaatagctgcaaaaggatatcttaaaggtacattacattgcagatgcaacagaagctaaatgcattagggatacatgggcaatatctactagtaggaaatatcagcactgttaggattacagccattttcttggctgacctttgtatggggatacataactctccttccttaaatagtatttcattgagatgggaaaaaagactcctgctctgcttgggcttttttagtgctctggcccttctctttaaatctgttgttaagagttcttgttttggcactatgcaaaagtgccttatactgaggcattttaagtacttaaacaatgaaacctccgttggctgtgttccacagtggaactaacccattccaaactttacacttgctggagtattataaccagacagcagtgttgtttgtaacagctggctagtctgtagatgaaattgatcaagatgttttagtttctcagttggtgcctttcaactctgcatttttcttcctctattctttcagaacctcactttcatcctttggctttgcatacttttccttgccccaatatttgaaggaagtttttaataacattcattttcaaagcaagccaggtgatacttaagtagtaacaggtataactggttaattccagagggtaactattatttttaacttttaaaaagcatataattgtcaggttgggcaattattatagggttgaggattgcctcatgtgtgaccttcctttcctattctacctacatgtctagttctctgtgttagtcttctgtccacttaaaatatcaattgaacagtaagctccacaaaggcagggcatagtatatacttactgagtatttcttgaacaaatgcacgcacatgtacctgtaattacccagggtttgggaaactagattttaaaaaatattttgaagggaaagggttgttactggctatacttaacttttaattttctccctccttaaatcaacatgttattcttcagcaatgatgtttacaaaaccaaataaaattagaattaaccatttgtttcccacttcagtgagtccgtacccagtggggtgatgtcactgtcatatttaggagaggccagatgatataattgcctttataactttctgttacaatttaaaagagcacagtgacttactaccagaaaagctttgtaccatcatattcttgtttatatgtagggaccacttaaccaagtggatacttttgtttagatttttaaaagttttagtttcatgtcttctaaactttaaaaatatcatcttattatatgatttattgttttgatctctctctatatatatatataattttatttttttgagatgcagtcggagtgcagtggcatgatctcagctcactgcaacctctgcctcctgggttcaagcgatcctcctgcctcagcctcccaagtatctgggattacaggtgtacacaaccatgcctggctaatttttgtatttttttgtagagacagggtttcgccttcttgaccaggctggtctcaaactcctgacctcaggcgatcctcccacctcagcctcccaaaatgctgggattacaagcatgagccactgtgcctggcctgttttatgattttaaattacagaaaatttgtttaagatagttcagaggtcctgtgtaatgtgcccccagcttcccctaatgttaacattttatataacactagtgtgatactattaactaaactaaggaatttatttggatttcccttgtttttctaccaaaatctttttctttggtttcagaattcaaaattattatacatgtttattttagaaaacgtatgtatataaaaacataaaacaaaatacggtgatcttcctacccagagacaactactgatatttttagtatatatccctcattcctggtctcgaactcctgagctcaagggatcccccctacctcagcctcccaaagtgctaggattagaggcatgagccactgcacctcttgctttttttatacttaatattagcatttacttcttttgtgaacctcttgccatgtttgctgtttttaatacatgtagttacatagtcataggttgcttaatgacagggacatgttctgagaaatgggttgttaggcaatttcatcattgtgaacattatagagtgtacttacagaaacctagatggtatagccaactatgcaccaagactgtatggtacagcctattgctcttaggctacaaacctgtacagcatgtgactgtattgaatactgtaggcagttgtaacacagtgctcagtatttatgtatctaaatatatctaaacatagaaaaggtactgtaaaaaaaaacggtataaaagatgataaaatggttcagctatatagggtgcttaccataaatggagcttgcaggactggaagttgctctgggtgagtcagtgaatgagtggtgactgactgtgaatgcctaagacattactgtacaccactgtccactttataaatactgtacacttatgctacactaaatttatgaaaatatttttattcagtaataaattaaccttagcttactataacctttttagtttacaaacttttaaatttttttgactttttgattcttttataacatttagcttaaaacaaacacactgtacagctgtacaaaaatattttttctttatgtccttattctaaaagcttttttatatttttaaaattgatttttttctctttaaacttctgtgttaaaactaagacacagtctcaaaacaaaaacaaaaacaaaaaactaagacacaatcacaaacattagccgaggcctacaaagggtcaggatcatcagtatcgctgtctttcacctccacatcttgtcccactggaaggtctttaaggtcagtaacatgcatgcagttgtcatctcctataagagtgtcttcttctggaatacctcctaaaggacctgcctgaggtgcttcttgagaaggtgtcattctttttagaaatattgatatgtccatggtggtttgctagtattcttgaataatgtgccctgctgtgacttcactagtctacaggaatttttcatctccattatattcttatgggacgactgtatatgcagtccgtcattgactgaaatgttatgtggttcatgactgtagtttattccctatttttagatattttgttgtttccatctctttgctcagttaattcttcatgattttaagtaaaaggccaactgtgtgtgtcttctcaatcttttcccccctaacaaatgagaaatatgacactcttatcattacagtggctcaataagccagtgattctaaatgtatgtatattatgttgaacgacttgaaattgccttttttttttgtctgtagcaaattttttactattggcaattttatgtggttcaacctaatagcttgaaaaagatttctaggttattctgaccaccctgcacccctgtcccatctctcacttccctgagaatctgcatttagaatagtgagctgtttctgaagcctttggactaagcaacaatgttgacaaacttaccttccaggagtctctgataagcacaacatcctgaagacatatccttgtgttgatgacatatgcagagaactttaactatagtgacttgcatctgtgtgtcagtacggtagagatagacttctgagttttcacctaagctctgcaagagagcctgatggtcctctatcctggttccatatctgtagtgactagctaaggacagtggtgccacccagtggcacgttatagacaagctgctgatgttgctttagcactcttcactgcatcaaattctttcctttcccatccctttcccttccccttcccttcttcccttcttcccttcatccctccttccctcccttccttcctctctccctttcttcccttctctcttctctcctccttccctccctcccttcttcctttctttttgttttctttcttttctcagggtctcactctgtcgcccaggctggagtgcagtggcgtaatctcagctcactgcaccctccacctcccaggctcaagcgatcctcccacctcagcctctggagtagctgagactacagtcgtgtgccaccacggcctgcaaatttttgtacagacaaggtttccccatgttgcccaggctggtctgaaacccctgggctcacatgatccgcccacctcaacctctttagtagctgggactacaggcacatgccatggcagctggctttctttttctttcttgcatactcttccacattcatggtctcattttccttttattttccccacctatgccactggcacttacgagcttcatttcggccagctgataatattcagggacactagccatataattttgctgtgatacccttattttaataaagctttggaatataggatgtgaaatagtaagtgtaaacacactgaacacactgtcacttactctgcttatgaagtcgtggttcttacccagaattggcatcaagtttgtacttggtcagaatatggcacttcttggccaggcatggtggcttacctctgtaatcccagcactttgggaggcagaggtgggagggtcgcttgagcccagaagttttgagaccagcctgggcaagatggtgagaccctgtctctacaaaatttttaaaaatgaaccaggcatgatggcgagtgcctgtaggcccagctactcaggaggctgaggtgggaagcttgcttgatcccaggaatttgaggctgcagtgagctgcgattgtgccactgtgctacagcctgggcaacagagcaggaccccatctcttaaaaaaatgccacttctcctgttcaatgatgagactcctaatatatgagaggaggccctcctatgtatttcaaatgtggagaggcatatacttctactcagattgaaagatttatcttggaaatccttttttggtttcctttctacataatatgacttcttatttcattccaacttaattccaaaaatatttatccagcacctactgtgaaccagtactgtgctaggccccaggtattacagtagttatcaagacagacatgacctctgcctctaaggagcttagagcctagcaggggaacaggaacttagacaaatttaagtgctgtcccgtagggtactttgaggtcaaatagcagaggcacttcacgtaacataggaggtcaaggaaggctttctacacatttcatttaaatgaagacctaaagggaagcaagaaaaggcagaagagaatgttactggcaaagggaaaagcatgtgctagaagcaagcagagatgagagattaagcttgatgcttttgagaaattaaaagaggttcaagttcgtaatggctacagctgtgagatcaactcttttaagtctcatgacagtacctgtaactaataatattatcccctccatttttatggttgtggcaaatgaggaaaagatgttaaatattttgccctaggtcatccatctctagtaagtggcacagccagggattgaacccaggtcatctggctgtagcatattggctcctaactaccatactggattgcctctcagctggggcatagtcttccttagtaaatggaatggtctgtgtctggtactacctaccataaaaagagctggagcttataggatctggattagtttagaaatacaggtttgctttagtcttttattcttgattgggaatgaaatgcttcatttgatatgcaactctgaggctattgacacatattttccaaaaaaccatagatgggaaattataactggttacatgtttattacaaaaataaaattggtgtgaaatatgtatttcctgcaaggctagggtttttgtttgattgttaaagttaacttggcaatatccttttctctgatttttaaagttaggctgagtgcagtggctcatgcctgtaatcccaaccctttgggcaaccaaggccggaggatcacttgagcccagaagtttaataccagcctggttaagatagtgagatgcttactctacaaaaataaaaaaataagttagctggatgcagtggtgagtttctaagtcctagttataggaggctaaggcaggaggatcccctgagcccagaagttcaaggcagcagtgagctatgattgtgccactgtactccagcctgggtgacaaagcaagaccccatctctcaacaaaaaaaattaaaaattaaaaaataaaattagttaaagggtgaacataacttattaaataggactatacttttttaaagtcacaaatcaaatacctatacacggagatattttcttacaatgcatctgatttatcctatatctgtttaagatacaagtgtgttttttgtgagatgagaaattgacttcagtttgaagtcatcagttaaggtgttaatctagattctagaaattggattataaatgttgcacataaactaagattgtagtaatttgatatcattgaaaaacacttggaataaagagtcttgtgtgtttgtgtgattaatggtgtgcagctggtgctttcatttacttgcccgtcgtatatgactgtggattcaaacaggagtttttacttggaagtgtttttccaggagtgaaggttggcttctgctaatatacccatacattcttgccttgttctctatgggatgaaagttaggatacaactagggtcatcattaggatatttttgcaaaagaaagaggggtttgataattatgctgggacaaccacaggacagtcctcagaaagctgggaaatgtgttcacctacattttattttattttattttttgagacagagtttcactcttgttgcccaggctggagtgcaatggcgtgatcttggctcactgcaacctccgcctcccgggttcaagcgattctcctgcctcagcctcctgagtagaggggattacaggcatgcaccaccaggcccggctaattttgtgtttttagtagagacgggttttctccgtgttggtcaggctagtcttgaactaccgacctccgtgatccgcctgctgcagcctcccaaagtgctgggattacaggcgtgagccaccgcacccggcctcgccttcattttaaccagtttatctggggatcaggtttgtgactctagcttccgaagtactggctcaacccagtttagcgaaccatcagtgacagagagatttccctctactttggagtaaaagttaatttttgagaaaatattctgttgtattattatactggaattgtatgcgtagcagctgtattctttttatactttttagcattgtgaactccatgctgccagaccctgttggggttattgcaggacacatttgtagatgtgtgggccttacaggaagtgaaattacttaatgatattttaccactgctcgaaacatttcgaaagaaaaactttgagagaaagaaatgattcagccttttctgcctcctactttttgaagtcagctagtacacatttgtaatgtgatagcacagttgattggaatgtctgaagctagacaggtaagatgataccctttgaagtttgagtatttggtcccagaaccaggttgtaaagaagaaagtactgatggaaagctcacttctgaaatcccctcctttcacaggccctctgatcacccgtgtggaaagtagccctctgggtctactaatcacagacatcaaaggaatgatattcatttggttccttttgcttgagttaccttctcctggggcaggcttaatttcctgtaggggactgattctggtcagttgaaaaacattttcattatggggcagaaggttgcaagtatggcatggtacctattctatctcatgcagatataatctggcatttgagttcccatttgttttaataggataagtaagtagaactcttagctttaaagaaatttatactttcatctgtgcagaacccctcatgattgtctggctttttgatattgtctgttaacttgctattacaggttgagtatctcttatccaaaatgcctggggccagaagtgtttggattttggaatttttcaggttttggaatatttgcattatatactgactggttgagcatccctaatccaaaaatctgaaatactccaatgagaatgtcctttgtgtgtcatgttggtgctcacaacgtttcagattttggagcatttcagattttggattttcagattagggagactcagcttgtaccagtcaatttttgttagtcacgttttgacataagggacaccaaaaggatgcttagcttcagaaaacagttaaccatggtagttatagtaaggaagaaaaccctcattttatttagcttataggttatattacatgagcaaaagaagagtttattttgctttgagcctaatttaaaaaccgaagatctaacctgctttccttagtacaaataaagccaacttttagctccttttacagtattactttgccacttgagtagggctaaacaccttttggaccatattcattgttactatcaatacatagacacacattagaattaattgaaaggctggtgctatattttctactttattattaaatgataaaagtaacattcactgtagaagttttagaaaatgtagggaaattataaggataaaactaaaaataacctctacgtgggtgcagtggctcatgcctgtaatcccattactttgggaggctgaggcagatggatcgcttgagcccaggagttggagaccagcctgggcaatgtggtgaaaccctgtctctaccaaaaatacaaaaaattagcctgatgtggtggcgcatgcctgtagtcccagctactcaggaggctgaggtggaaggatggcttgagcccaagaggtcgaggctgcagtgagccaagattgcaccactggattcctgcctgggtaaccgagcaagaccttgtctcaataaaaaaaaaaatcacctgtaattctgcaacctagagattaacattttggtttatagcctacataaatttgaggaagttgatcttgagtatgaagtttcatcttaaaccaatttcacttcatatatcttaaacattttctcatactcttaaatactctggcaatgctgcatttgatggccgcatagtatttgatcacatggatacattattttaccaatcacctattgggaatttgaagttgttcctattttttttttctgttatccataccaccatgatgactgtcctctatttttttgtgtgaatctctaatgatttcctttaggataggggtccgcaactcccagaccatggaccggtactggtccatggcctgttaggagctgtgctgcacagcaggaggtgagcgacaagtgagcatttctgcctgagctccgcctctggtctctggtgcccgaaagtttgagaactgtggctttaggatattcccagaaatagaaagtgaaattacaagtgcaggaagtataactgaaggcctgttgtcacatattaccaagttattttctatttagcatgtactaatttctacttttgtcaacagtatataaagtgcctttttgtatacttttggcagcactgagtaatttctttattcttaattggcactagtttttatggacccccagtgcattgctatctgttttagtaaataaaagttattcatggcaggaattaaaataaggatgcaatattataagtagtagtactgcaaggaactggtaactccagctggtactttgagaattgtctaaacggaccatattttaactctaagggtctatgtttctaaaaatatatttttcctttctgaaatacttttatcagtctctaatgtagaggaaagtgctatttttttctcctaaagttgtaattccatatgtactttctgctcattacgttaggcatttctctgtgtgtaagacttatgtttttgccattttaaaaaacaaaaacaaaacatacattctggcaaaaattgtacaaattttgtgggaagtcttgattgttacacaagagtactttctggttaagaacacttaaggtaacaatcactttcttcaagtattgttcaggtctgtagtattttaatgaatgccttgtaaattcagattcatccatgtatcaacacacttcttgactaaacttggaaaggagagttgtggtaaggtcagtgtttgctgttatgtaatctgtttgtccaaaatatttaaaaatcagtatcgtaagattcttaattcagagtcaagaattatcagtgtgacagcaattttcatatgttgaaagttttttccccagtagttgtttcatgataatcaagctgtttcttaggtgtggacctcaaaaagtattatcagttgatttttatgactttgaaaaattctaatttaaatgcaattgatatattgagagctcataaacagaatgtgctttccctgttgatactgctgctaatttaattctaggtaactgaaggaaaaggaatggtgtgcattcttgttgttttttcatactctcacattcatcttttatctagtctcaagatgatcttaagagtaaagctgtaattataactgattagaaagaatttcctaactttagtatagagggaagcacatagggtgctttcttaatgttctagaaagcagaccctattttagcttcttagtcatggagtggggggaactgtttctttctttttaaaattattttacagttatcattgtattcaatttttaaaattcttacaacctctgtgaagaaggtaaagagtagatgaataaattttaatgtcaacctagaacttcactccataatttatttgtgttatagtaagttattttaagctagtatatacccctattcaaaagtcaagatttaaacattgttgctaaaaagtaaatggggcctggcgccatggcttacgcctgtaatcctagcactttgggaggctgagacgggtggatcacctgaggtcgggagtttgagaccagcctgaccaacatggagaaaccccgtctctactaaaaatacaaaattagccaggcatggtggtgcatgcctgtaatcctagctacacgggaggctgaggcaggagaatcgcttgaacccgggaggtggaggttgtggtgagccaagatcgtgccattgcactccagcctgggcaacaaaagcaaaactccacctctcaaaggaactttctggcatttaaaaaagctttccttggatcagatattgaaaatccctctagtgttttaatagcttctatttgtcactaaatatgaaggatgggtgggtttgtggttaaaaaaataaatagcaacaatttcccaaaaggtacatatttaaactgaatttcaaagccgagataaaaagtatggttcagaaaccggagatttcagttaagcttcaggtaaaggaagcaaataggcagaataaaccacacagacaaaatgtcaaaccaggcaatgtttgtctttgagcatcttccatttcttattttagtaggcatctcactggttccctgtgtcttttatcctgctctctgtcactggtagcagaacaagctaaacttccttaagcaaaactgtcctaagaaatgtacactgcagagacttcctaaagagagatggatggattcatttggaaacatctgtgtgcacactctaatttgtattcatttttccctagagaatgattacacctatataattaaaaagttgcctttgaaaactattggcaccaaaaatggacaataattaatgacccatccctcattttttaaaaccattttattgtggtaggattgacatacaaaaagctgtaaagatggaatgtatacaactcaatgagttcggagagaatcatcaccacaatctatgccataaacccatccatcacttccaaaagtttcctcctgccctcttatgtattgttatttgtgtgtgtgtgtgtgtgtgtgagagagagagagatgaaaacacttaaaataagatataccctattagcaaattttaaaatacacaatgcagtattgttaactataggcaccatgctgtacagtagatctctgggacttcttcatctttcataactgaaactttgtatcatttgactaataccatcctgtttctccctctacccagcccctggtcaccaccattctgctctctgcttctatgagtttgactctttttagtttccttttataaatggtgtaatgtagtatttgtccttctgtgtctagcttatttcacttagcatagtgtcctccaggtttgcccaagagaagtgtttcttttttagagacaagctcattatctttactttaaagcctattttggttctgagagtctacaacttggtatgtaaggagtgaaatttgtgtgcttgcagttcattaggcacttgatagatctacatcgtatttatatatcttcatactaatcatgggggagaatttatgtaacaaaatgaatgataatagaattattagctaagattggactatttctcttggcattcaaactagactctgtctttgagtttagatgaagagaatgggtctaagataaataagcattgcttatttgctgtaatgtttaccttatttaagtaagaaaaataaaaataaacattgcttcaaaatggataaagtgaaaactatcagaatactgcatatttatctatgcaaggaaatatgactgttgtcatggatatgcagtttggtatctcaagcaagaaggtatcagagaatgtgaatatggcatagtttataagatctgtgacctaataatcatacttctaagaaatgcgagggaataattttatagtcttgaagtgggaaaatgacccagaagccataaaggagatatattttactacttaaaactaaaaaacaaacagccaacaacaacaaaaaaaccccacaatatttatctaatatgtctaagaaattcagacatagtgaatttttttttttttatttgagatggagtctcgctctgcagtggtgcaatctcggctcactgcaacctccacctcccagattcaaccaattctcctgcctcagcctcccgaatagctgggattacaggtgcctgccaccacacctggctaatgtttgtatttttgctagagacagggtttcaccatgttggccaggctgacctcgaactcctgacctcaagtgttctgcccacctcgacctcccaaagtgctgggattacaggcgtgagccaccatacccagccagtgaaatattttcatatgttcattagctaatagtgaaaagcaaaaaattaagacagtgtttttggtatctatcaaacagttcaatccagtattggaggagatatggggaaatgggcatattaatatactgccggtgggaatatgaaactatattcttttttagagggcatttttacttttttaaaaaaaataaattttagactcacaatagagttgcaaaaatcatacaccatttccatgggtcctttacccaatttcccctaatgttaacatgttacacgattatagtacaattataaaaactaaaaatgttcctaatctgggttaatctaatgttttttcatgatttgattgagattatgcaatttgggcaagaataccacaaaaatgatgctgtgttcttctcagtgaatcaaactagggcttacatgatatagatgtaccttatactggtgatggtaactctgatcacctagttaagatggtatcagctgtgtttttccacagtaatgttatcattttcccctttgcaatgaagtaatatccacacactttttattaatacatatttgggggagatactttgagacaatgtaatgtccagtttcagcttttgctcaccagcattagcattcactgatggattttgcctgtagtaattattcctgtggtgttctaatggagatttctatttcctttattccttctacatttattagaattcttctatgaggaagattagtctcttctccctcatttacttatttgattgttcatttatattagtatggactcgtgggtattattttactctgtgggatataatctagtattattgttatttgttgcccagattgtgttaataccagctgtggccattgggaactctttttgggttggcccctgtgtccttttcacatgtctccatttaaaaaaattcagcacttttttattccttggcaccagataacactaacctcatcttgaatatttcctgcctcagccccgtaatcaactgctccaaagagctctggttctttttcttggagaatagtatttggaacaagatctgtgtgctggatatgctcattgctattggggtatcactgcttctaggcctggagggcaatttttaatagactaaatataaaatgatcatacccttttgaatcagcagttctgctagatataaatcctctagaatcactagcataagtatattgatagggatgttcattctgatctttcaaatgatcagaaattagaaaaaccccaaatgtctaccaacagagaatatgggttaacttaattgtgatatggtcatgcaatcaatggaatgccttggaatggttaaaaaatagatctatgtattctgccatggaaagacatgtaagagagtcagtttgttttttgtttttgtttttgttttttttgagacagaggtttgccattgtcgcccaggctggagtgcaatgatgcaatcttggctcactgcaacctccgcctcccgggtttgagtgattctcctgcttcagcctcccgagtagctgggattacaggcgtccaccaccacgcttgactgattttgtttttgtatttttagtagagatggggtttcaccatgttggccaggctggtctcgaactcctgacctcaggtgatccacccacctcggcctcccaaagtgttgggattacaggcgtgagccaccacgcctggcccagttttttttttttttttttaaagcaagttgcagacatgtatagatagtatgattcaattgttgtttaaaaattgtatgtgttagccaggcggagtggctcacgcctgtaatcccagcactttgggaggccgaggtgggcgaatcacaaggtcaggagatcgaaaccaccctggctaacacagtgaaaccccatctctactaaaaatacacaaaattagctaggcgtggtggtgggtgcctgtagtcccagctactcgggaggctgaggcaggagaatggtgtgaaccgtgaggcggaggttgcagtgagccgagatcatgccactgcactccagcctgggcgacagagcgagactccatctaaaaaaaaaaaaaaaagaaaaagaagaagaagaaaaattctatgtgttggccaggcgaggtggctcatgcctgtaatcccagcattttgggaggccgaggtgggtggttcacttgaggtcaggagttcaagaccagcttgtccaatatggtgaaaccctgtctttactcaaaatacaaaaattagcggcgtgctgtggtgcacacctgtagtcccagctactcagaaggctgaggcaggagaatcgcttgaacctgggaagtggaagttgcagtgagccgagatcatgccactgcattccagtctgggtgacagagtgagactccatcatctcaaaaaaaaaaaatgtatgtgtgtattagaatatgcttagaaaaaaggcttcaaagttacccaccaaatgtaaaaagctgttatttctaggtggttggataaaaaggacactttcacttcatttaatatattttgtaatgtttgaatatttttattttattgtttgtttgcttatttatttatttattttgagatggagtcttgctctatcagccaggctggagtgcagtggtgcgatctcggctcacggcagcctctgcctcccgggttcaagtgattctcctgcctcagcctcctgagtagctgggactgcaggtgtgcgccaccacacctggctaatttttgtatttttagtagagacagggtttcaccatgttggtcaggctggtctcgaactcctgacctcatgatccgcccgcctcagcctcccaaagtgctgggattataggcatgagccaccgtgcccagccctgaatatttttaaaaaactttttaaaaaagttatctaacttttccatgaagcaacatatctagttcattctgtacattgcacaggctagactttgggtagttgtacttatgttataacatttatttaatatgttttaatatttacgaatcaagtgactcaatcttatgaccacttagttctcctgtgctacacattcacatatattcttttttttttttttttatgagacagagtctcactctgtcacccaggctggagtgcagtgatgcaatcgtggctcactgcagcctccgtctcccggtttcaagtaattctcatgtctcagccttccgagtagctggggttacaggcgtgcaccgtggtgcccggctaatttatttttgttatttctagtggagaggtggtttttcaccatgttggccaggctggtcttgaactcctgacctcaggtgatctgcccgctttggcctcccagagtgcttggattgcaggcgtgagccaccgtgcccgactacattcacatatattcttttttttttttttttttttttttgagacggagtctcactcagtcgcccaggctggagtgcagtggtgtgatctcagctcactgcaacctctgcctcccgggttcaagtagttctcctgcctcagcctcctgagtagctaggattacaggcatccaccaccacgcctggctaatttttgtatttttagtagcgatagggtttcaccatgttggtcaggctgttctcgaccttgtgatctgcccccctcagcctccgatagtgctgggattacaggcgtgagccactgcgtctggctcacatatattcttaaggggaaaagattctcccacagcttagcgtgtgagtgataccttccagtagtttgactggcttacgacagttttttagtactgtttttaatgagacattttcttgttcctttatgatttttaaaataaattttaagtatacaatttttatttttgaaaattttggaagacactaaatcagcaggaaaaaaacccaaaatatatgcaaatattaaaacaattcacctctaatcctaccacccagcaataactgttagtatttgaagtacattttgctaatttttctatgaatatgtaacactcaaatatatgtacatatttagaatgcagtcatacatactgtttttgacctgtatttcttgataacaacatttctaaacattgaaatgtattttagtatggcagttttaatctactattaaccaatatgtgatttatgtatacttatctaaaataagacctatcaaggaccattgtttagggaattgttttgaaaaggacttggccagaatttacttttagatttgaacattaaatgctaaaaactttcttaatgtttttctttttgtttttgagaccgagtctcactctatcacccaggctggagtgcggtggcatgatcttgactcccgggttcaagtgattctcctgccgcagcctcccccgtagctgggttaataggcatgcaccaccacacccagctaatttttgtatttttagtagagatggggtttcgccatgttggccacgctggtctcaaactcttgaactcaggtcatctgctcacctcagcctcccaaagtactgggataataggcatgagccaccgcacctggccaaaagctttcttaatatttttccactgttttctgaaacattctattttaaacttattaagatcgatttttgagacattaagtccaggacgatgattcttcgtgcttgaaacatttccaacagatgctatcacaagtttagtatggactttacttgtggaagaatgttttcaaaatattgcttaacagaccaacttatttgcagagagggctagagccaaacacattaatgatttgttttaaagtctgtccccaaatatgagggttgtctgaaattgaatgacactgccttgtattcgtatcagtttttactttttttatatcactttttgctctcctattagctgcgtggactttgttttgctcactggcatttggtgagttgggctttctcagtgctgccttcttttctaattgtaagatgataaacccttgatgctgtattatctcttttttctttttttaatgccaccaggttactgttaggtcaaaacaaacaatattatatgcttcagtctgttaaaaatttgctaggctaacactttctaactttcttatattagaaaaaaaccttgcatatatctgaagtgaaagagtctaaagtttgttttacaattttagctaaatcatcccaattcctgatcatctataaatgcaacccacatggtggtaatctgcttagttttttatattaaattatttcttcaatttattttaatataatgactttaacagggagatgctattttgtaggaggagactaggagagaagagagtgcaggatcagtttttctgttgtgtagaagtaaattaggctaggttacaaaatgtgatttggtttccttttctttgctgggtagctgctactttcatttttttgtgatgaaagaaatggcttttaaggtgataggcattgagaaaaattacttccttcacattagagaacctctgagagttgcttctcctgctcagccaatttggggctacaagaatggagacgagtagaaggtttaagctggggctctcatccagcttggagaattccctgacactctctagtaccaagggtcaagagttgactatcctttgcaaatatttatttatggagttattttccaaattaagcaaactagcggatagttttgtattttcccctatccctctcccctgcaacttctacctttagatctttagatgattttatagaaggatgggtttttttttttggtcatttttaagttactggaattatctatgggggaaatgtgtacgtttttatatagaaatatgaagattttcttctccagcattctccttgtgagctctttggatcttattttaatatctatatgcaagttccccgcgcccccccccccatgtcaatagcaaatgttagccttctggaagaaaaataagaacatatgaaataacctgacttctgtttataagtaatcttaaccatttgtgttaagacatatactgatactgtccctggtaacccctcaacaaaagtagattgtggatattaacataaagttgaaagtagttcactattattaactagcctttgttagtaataggcttggatataaatcattctttccttcatctctttaatggtagcaaagagaaaattaactgtatgaattaacaccagctagttagtgtgatgattacagttatgtggatgttcgtttatatgacttccatgggggcgtctagactaaaaaaaaccaacaaaacaaaaaactcgaagggttattctcataatcatatgcaagtagtagtgaatactgctggatggaataaagcctcagttcttcagaatatagcatcatgcccagggggccccagctctgtagaaagcaatatcaaattactgaaaggccttattttattattccaagtattcagatggtaactagtttactcctgcattgtccaaaataggtcaaaccctcaaccctaaactgacaaacatttctggtgtatatatttttttctttttcttttttcttttctttttttctttcttgtttttttagacagggtctcactctggttgcacaggctggagtgcagtggtgcaatcttggctcattgcagccttgacctcccagactctggtgatcctctcacttcagcctcctgagtagttgggactacaggcatgcaccaccatgttcggctaattttttgtatttttagtagagatggggttttgccatttttcctagactggttttgaactcctggattcaaggtatctgcctgccttggtctcccagggtgctgggattacaggcatgagtcaccattacctggtccttttggtgtatatcttgaaaaatgtcacaaaaatgatgtgtttacaaattgaaaaaagatggaaatatatttaggtttctacctagaccagtgtcatatttgtatttgggaagaaacctcgtgttgtttcaaggaacttactcgtttttggttttgatgggaggatagatgcctacagtcatctgtgtgtggggatggctgtcttgtgtgactgactagtttgctgtggtcagacattgtctctgtgtctgaacatggctttggtcctgaccatgggggattcagagatacaaataaaacagttaagaacatggctcttgcttcttgtcatttttccatagagtttcaactactgtcacttagattctggctcagttactttctgagatcctaagagcactaattctagtcagacactcatctctagtcatttcttgcttttcctttagtacctggcttatgagctaaggtgcacagataatgtgaacaagcactcgatatttcttttaaaggggcacttttcttatgtcactgtactcataaatgctgtctcttactgcagattgaaatcacagaagatattcgtgttcttcttaagagaaaaagaggacatttgtaagtatttgtcctttagaaattctaaatgtgtaattttattagctttttgagaaaattaagttcccacactaacaggcatcttgaccctttttatagaggaaaaactctaccaatatttatgattgtgtttaaaaaggcagtattttatagagcaaaataggaaaacattttaccctgtgcagcttctaaaatttaaaccatttgccactcatttgtaaaagaacaagtggtaattaaaattcaaacaacgtctttctatttgagtcatacccaaaactggagtcagggattggagttctggttctgactactgaggcttatagaatatgtgtctttggtaaactacttagtctctcattatctcagtttccttatctttaaaatgggtttaacagtaagtgcacaatcaggggttcattattattattattattgttgttgttgagacagagtctcgctctgtcttccaggcttgagtgtagtggcgccatctcagctcactgcaacctccacctccgcctcccgctcctgagtagttgggattacaggcacgtgccaccgcgcccagctatttttttgtatttttagtagagacggggtttcatcatgttgcccaggctggtcttgaactcctggcctcaagttattctcccgcctcggccttccaaagtgctggattacaggcgtgagccaccgcgcccgtcctcagtggttcattattattgatggagttaaatccatagcagtttatgcttgccccgatacgttgaagcttattcttttttttttttgccccaagatggagtcttgctctgtcacccagactggagtgcagtggtgtgatctcggctcactgcaacctctgcctcccgggtttaagcaattctcctgccttagcctcctgaatagctgggattataggtgcccgccatggcgcctggctaacttttgtatttttactagagaaggggtttcaccatgttggccaggctggtctcaaactcctgacctcgtgattctcccaccttggcctcccaaagtgctgggattacaggcatgagccaccataccagcctgaagcttattctttgagagacagccacaatgtatacttgtgccgaagcttattgaagaataagcttcaatgtatcggggcaagtatacattgaggctgtctctcaaactgatttgcgtgtatttctgatcttcataaatttttaagtatatatttcattgaggcatctattctagactacaatatggagtaaaagaaatacaacagagcacctaaaattaaaatcatagtgtttgaggcttggactttgaaatttacctagtcctatagtccccgattgttgatttttagaccagtgctggttagtgaaaacgtttttactggtccatggtgaagtgagaaaaataaggacagcagatcatgagtttttaaaagctaaacattttcagtttaaaggattgcttcttatagaatatatctttctaatttaggggaattaaacatgttatttatctcatgaaattatggtgatagtaaatggtagggctttaaaaaaattcatgcctggcaaaacaacaacaacaacttggtagctctgtgtcatttccccccactaattctttcttttacattttttgctgttttgtgatatcttaaaatatgaacccaactttctcattttacagatgaggaaacagacattgagaggttaatttgttccaggtcttaccactcagcagcttgtgaaccaggactaaaaccctatatctgatactgtctctctagaacttctggtcttctgaaaattgctttcattataataggttataaatttgaaactgaagatatagtagttcttatgtgctaataactatttttgatttccaagtataaagaaattcaaaaggccatgtttttgtatagctaaatgctgaagtccactgattagcctgcattagaagaatcttaaacatggccaaagatttgtatcagcagatcagaattagctgtcaccgaattcagctacttaggtgttacacgctacccagtggctgacaaagaagttaaaatatcagcaaaattattatttccttttggaagttgacagactatactgccactgtgaagagtggtagtattcaaacttctatagttaatttaactacagaaagtactgttttctctctcatagatgcacacctacacacacacacatacatatttatagcaatcaatctgcagcccatctagatttggaagggaaaaaactaccaaggtgaagagtaggagttaccagaagcactggcatgaacatatctggccagttgtgttcaggagattgcagatagtactctgtgacactttggaggccccccatcaattgcctttgtctgaactttcccaaaatatgtttcaaaatggaaataattagctcccttatcaaccttgtcttactcatcttactgaagcataagccagataaacaaatgaatgtggagggagagaacagaatggaatgtattcccaatcctaatgtggaaatattaactccaggggtacttttccatggcttcttatatttggctttgtgtgacttccttctttaggtaggaattctttaatttctgaaatgtcagacatactcaaaatgaaatgctaataaggataaaatgcatttttgaattatctgctgtctttagaatatgtggccttctgttctttactacggctaatatgtgagcattgactatatggccataagatttcaatattcaacagatttatcagtctttgagttatttaattagaatcacttctaagatctatttaatactgaaaagcagaatgagtttttttttttttaaatcacgatacaattttgtattatggtggtcaggcagctgaattatagtcatttatttggccattttataagaaatggtttaagactgcattgttgcataatttattaacagtctgacatattgaaaagaacattgacaaactaacctattaagctggttcctcctctggcagatggggagggcagatcatgtggcaaaaaaaggcatagttgtaaaattctccctgtaacatgaatctattcctatgggaactactactgctgcttaaagacttttttggaacctacactcatggttgaaagccctaagttgtattactttattataataaatatgtaagatgacaggagatagatgtataacctatagatattttgtatattcttcacttgaacaaaacacatttattataaaagttaactttaaagttaaattctataacccaattatttttggttaacttatgttaaaatcatctatatatcccaacagagaaaaagcacccagtaaatcgaagactttgtagataaaataaaagtctgcactgtggtacaatgggcagtttaatttagcagcaaggttttgtgtacagggacctgcagcagttactctttagcatcagttgtacaacattgacattgtcattgtgctgtctgctgcccttctacagcaatgaaccatttgtattgctctctaaacacatatcacccagaacttagtttttctccctttttcattatgtttaataaagtttgattatagcatcatgcttagccagtaggtgccacttctagcctgatttatcctcaagattccttaaatgtaagctttggattatttacaaccaattattggattaaattatatacaaccaattcccagctttagaaagctacatttttaaaaatcaagtgtatcttgatcacttaaaatgaggaatagatgtataattatacacagtgtatgtgaagtgtgtaggcatcaacattgactcctagagctcctcattttaacatacatagataggatactgattataacatcctatgacctagcaacaacattatctgatgcatgctggggatcttcttaaggcatgatgggagggaattcactctagagcattaaaagtgtcttcaacatggcagctgaggtgctttctttgctgggaaaagctgcaaagagactggcagaatggcgacttcaggagttaatacctctccaggtgatgaagtaaacaggttcagtttatcttgtgagagacgcacccaaagatcagtcataattgtgaaaagctttcagtcatactagccaggcacaggtgtaatgtgttggtatatggcatctctatagtcatcttaggttttgttttgcttttcttggttttaaaatgtatttattataattactgtatatttgagcttaaggtttgattgcacaagttatttgatattgaatagactgcttgttatttgcaatataacaatttgaatcagatgagacaagtgccgtaatgatacatatattttacatgattatttcgtcttgcagactgatgaaagatcttgttagaactcttaatgcttttattttcttaatgtattggcattctctaagttttaatgttaaagtataaagttaattgtaatgtctcttgtaaagtttgatttcatttacaaagtgaaaccattctgactcaacctagttgagctttctctggtatgttttacaatcatttggaagtttttaatagtgtatgaaagaaaataagattttaaggaagcactccacccctttacaaaagtccttgtgatgcaacatgtatttagaaatatgatcttttaaagtacagcaggtattcttatcggtttaatctcttggaacttttataattgttttctgatttaatgtttactagttacaactaatctttttcagaaggcaaattgtctctttatttggtgcttaaattactcttaaataatgtgtaacttgaaaatgagacttctaaaaaagtagcacttatatagttaattgttgattttcaaattgatttaaaaactatttttgtaagatcttatgtcaaggacaaagttaatttgtcactactgtatgtttcaacttggcagatgcatggatccttgcttggtttagttcattttctaaaacttttgaaaaaatatcttggcattaaccaactgcagttcagtagtttttctctttcattctcaaattggtgttgtgtcacatgcttctgggtaagacgatttcttcttttaaattcagactttaattaatatgtagtgtttgtttactttgtgtactagagcttaatgtatcactaatgctttctgtatttaacctatctcggagtgtttgaagtaactggaatgaaatacttattaaatctcacctcagaacaaaaaaataaaataaaattgaatctgatttttcactaaaacttctagtacttactggacatctatagaggccccccccccctaaaatgtcttaggatgtaggacagattagtgctcaaaattgttgccagtatttcttcatacccaaagtttgtcactctcacttatttagattataccagtattactaggatcacagataattgagctaaaaacatggactttaaaatcaaagcgacctggttcgaatctctactcagctgtgctatcttgggcaacttaatctctctgagtctgttatatctttaaaatgaaggtactacctcaaaggagttttctgaaggattaaatgagataatatatctgaaggacttagcacagtatctagcctgtagtaaatgctcaatacctggttattactatgattcccatatggaatggtaaagttcaacaggagcaattaactatccaatgactgaagataatgccctgcctttttctggctgacatacaaatacatgatttcaaggaagcaccactcaaagttcatgtcctcctaatgatgggatagcagtatcattcttcatacatggaaggacagcatacctttgtgaaaattatcagtgaaaatgcacatagtgcaaattgtgtaaccttcatgcttttataacaccaatcttttccaactctatgcaacaggcagtttttccagtttcatattttctattaagcaactaacaacatgttcaagtttattttaattaccagggattttaagagtatagtatttcctaggatgttgacatggacaagtgattgttttttaagatgattaaagttagctaccttcacgttattgtacttgcatatatttttaccttatagattcagaataattccagtacattcttaattcagtaaacaatttgattgaagccaacacacggaggcactgttccagtcacagattcagcagcaaatgagacaaactctctgccttgtgaagcttatattctactgggagcatagacagtaaacatgaaaaataaaacatggtatattagtaaaagtactcaggaaaaaaataacgcaagtaagggatagaaagtgtggggagtacaattttaaaagaagttggctggagaaatgcctcactgagaaggtgttctttgagtaaagaaaaaaaaagaggcaagagaataagctacgtagatgtcttggaagaacattccaggcagagagaacctcaagtacaaaggccatggggcaggaacaaatgggactgcagaagaatgttccagggaaagcgtactaggaggtgaagtcagaaccttggggtaggggaaagactatatagtcttgtaggttgtagtaaggacttcagcttatattctgggtgagtcatatgggaattctttgaaagattttgagcagaggaatggtatgatctaacttacattttgagaatagtactctggcttctgagtttagaatttattgtaggggtatgagatggaagcagggagactagattggctatcccatttatccacatgagagatgatattggcttaaaccaggatggtaacagtggaggtggtaagaagtagttgaattagattcaccttttttgtaagtcaaaccattaggatttgctggtgaattgcctgtggaatgtgtgagaaagagaggggggtaaaagggtgaatctaaggtttttggtcaaagcaagtggaatatatagagatgggcaagactgggtgagataggattgtggaaggatgatctcagttttgaacatgctaagtttgaggtatttaactgacacctaagtggatctgttgaggaaacagttggatatacaaatctagtgtttaaggcagacttccaggcttgaaggaaaaatttggaagtcatcacgacatatatgtggtatttaaaattgtgaggttcaaggaccaagccccataccatttagaggccaggaatgtgaggaagaagcagaaaaaaaaaaaaagactgaaaaggaatagccagggaagtaggaagaaaacctgaagaatatggtttcctggaagctaagtgaagaagtttaaagcagaagagggctcagctgtgttaaaggctgccagtgggtcaaggaagaagagaactgagctttaattgacctttggatctaatagcatggaagtcattggagaccctgatgaggagaacaagtttatagagtggtaggagacataagcctgattgtagtgggttcaagagaaaataggagagaactgggagacagagagccatagacacctctttcaaggagtgccaaagagatagaaaataaatgggctatagctgaaaagaagatgcaaaggagggaatgttttttaagatgaaagaaataacagctggttatgatgctgaagggaatagttcagaagagcagggaaaattaatgaggaaggacgagagggaagaattggtagagtagcacttccgtgtccttataaagacagggtgtaatgcataaatgaaggggttggcctcagcttggagcatcaacagttcatccatagtcacaggagagaaaacagcatgtggccacagatttgattaggtgggtagatgtagcagtgagagtctgtggaaattatctttggattgttgctgttttgtctgcaaaataggtcagctgctgagaataagtctggatgaggaatgttggtggtctgaagagagtaaagtatgaaatccagaggagtgggccagtgagtggactagtgcggtgtggtctctctgcatcagggagagtccatttgaggtagcaatcacaagtttaaagtgagacactcaacacagtcatgtgtttctcacagcaaattcagctgcataggtacaggtacagattaggtggagaattggataggatagaaccaggctgtggttgagatgattaagtacaaccaagtgagacaaccaagagggactgagtatgattgcctatggaatttaagaggaagaagacaaaggtttctcacaaaagcactataaagtaggtaatataagcagtattcctgttttacagatgaagccactaatatagagctttcttttttaaatcatactttaaattctgggatacatgtgcagaacgtgcaggtttgttacataggtatacacgtgccatggtggtttgctgcacccatcaacccatcatctacgttaggtatttctcctaatgctatccctcccctagccctccatcccctgacaggcccctgtgtgtgatgtaaccctccctgtgtccatgttttctcattgttcaacttccacttgtgagtaagaacatgcagtgttaagttttctgttcctgtgttagtttgctgagaatgatggtttccagcttcatccatctccatgcaaaggacatgaactcattgttttttatggctgcatagaaccacattttaaacccagatctgttagcctagaaaatttttgttgtttctcttatgagacattatattttgcctaatgatgggtacgatgctcagcatcatacccttaccaccaactcttctttttttgaagtgaaatgaaatgtttaaatcttttttgaaatgaatttatcaatagactgagtataacccctgacaaggaagtattatagtttaagatgataggcaaaactgggcagaggctggctagtgtacttgaaagagcactgggtgctcgatttgtgctctgccattcatttgcttctctgtaagatgagggctcagacaatatcagtggttcaaatattcagctgaactggaagttccaaggagtcccttcaggggctgtcatagcctcctctaccagagcagctatgctttttgctttcatctacgcttgtgtttttatatctatataagattttattcaaatggatgacccatgaccccctcactacctgcagaaagaatttgaaaacctctagactaaatgatctctctggtttcttctcacctgaatgttctttgagccttgcctactgtgtgtgtgtgtgtgtgtgtgtgtgtgtgcatgcgtgtgtgtgtgtctgtactaagcactatgaggattacctagaaagcatttctctttctctaagacttaaggcaaatatgtataaaagattaaatttatgtaacatcaataactaaaaaacatacaatgcattttaaatccaactaaagtacaggctcttcaaaagctattttctgtttctttatatattttcagccttaagcctgaagatttctcaattgagggtaaggtggtactcaccccttaggggcattttataaatctgaagacatgcttttatgtctgctaatattgtctctgagaatgtatgtattgaaacaagtattttgttaaattttaaattagtttctttatggtactcttttatattaccagtaagaaatcattttttaaaatggtgtgttggtagattatgactatcctttgatgttgatgaagaggtatcacaaaatatttgtcataagaaagaggtactgggtttgatatggttgagaactactggtccgtgttctatactgtggtacccagaagtttggaagtgatggtagtataatcatgtatcagattgagtggtagatattgctaatgatgtgtgaaattagaaaaagtaaagattgttctggacttgggtagccatgaaatcttcagtgggaggagaggattgttagaggggatcttacattcagcattatgataaacccttgacatgacataccttatcttgaagaaatgaatgaccagacttgtccgagagactaagaaggtactttccaagtagggtaagtcatagaatttaaagctggaaaggccctaagaatcacctaggccagacatttttagttcagggttgttgccctttgaagttcatggatggatttcaaggaacttgtgaatcacttgacattgtgtgtatcatttagcatgtctttctgaggggaattgggttcctcgttctcattctcaaaaaggcccatcatctctaagaggttaaggcctgctgatctagtgtggtcccagactgaggtagatggtttgctcaaggttacacagccagttaggggcagagatgaggattgacacccagtgacttccagtttctttctcatttcactgtactcaactaaattacatgaacaaaggcacaggcaggattaagctaccattttatattagatggtataaaaacaatcaactagcctggggtcaattgaattaagtctgtcagtctgtttctacaaaagttgcagaaggatgggcttcagtttgtctcttcaaagtgaactaatattttgatttttctggttgaaatatgctacaactcaccgaagtagctttctcagttgaaggtaagctccttaaaaaatgttcctattcttgggccgggtgtggtggcccccgcctgtaatcccagcactttgggaggccattgagggcagatagcttgagtccaggattttgagaacagcctgagcaacaatggcaaaaccccgtctctacaaaaaatggaaaaaaactagccaggcatggtgatgcacatctgtgttcccagctactcgggaggctgaggtgggaggatcttttgagtccgggaggcagaggttgcagtgagctgagatcatgccactgcactctggcccgtgtgacaaagtgagaccttgtctcaaaaaaaaaaaaaaaaaaaaaagaaagaaaagaaatattactattcttgagcctgtttctgcggtttctttccaatggcactgtttttctaacctgcagcagcccccagctttccacataatccaatcaaaattactttgcctgatttgttagattttgtaactaccgtagcgtatttagtcaagcgtatttagcgtatttagtgtatgctgtgccccagtcagactagtgtccttgctattggtacttcctattctcccaaagtcctttcattcccaccttcgtatcttttttcatatggtccctgagcctggaataccttccattcctctttcatttctagatgcccaacataaggtccagcttaaatctaatctccacaaagcctctcctagttactcttggccattttgcacttcctctgaactccttttgcatttattgcttatactactgcctacactgcacatggtagttatgtattagttatgtattaccacaaggcttttcagtggaaatgctttagtggtcaccttgggagttgggattccgggaattctggggcaggactctggacatccccaaaccctgttttggccagagcaactccactttagtgttatatatgggcagtttccagtagtgtttattagaagagatggtttaattgcaccccctgtccccgttcccccaaacagttgcaaaaatactggatctatcttgtgtgatagttgactcataagtgttaacttataatggccaagggccaggaattaatactacttcagacttgtattaccactcctaggcaactggtgcagttttgagcacaaagtggacatgtaggaaatgattttacaattgtattgctcccatgtgggaaatagtagatagtaaatagcattacctgagaaatttaccttaatgaagaactcagaataaggtttctgggttgacctttgagaaataaatctaagttgatagtttctgccccacccccccctttggatataaacctaacactatttaaagatgtctagtttacatgcacatgtttaagagaaatcttattattggcataccctattctaccaaagttttgacaaacttaaatatcatattcatgcatttgtgtaagcattaaggttgttattcaactcacagaatgatatgcagagtaccagtacacctagaaacctagaaaaaaataaattcagaagttgatgtgctcaaagacatttacgtcaataatgattacaaatggaaaatgccagcctttcagaccagttatttcagctttctgtaattaattgtgtaaactaataaagacctgagtatttaaatcaattgtgctatcaacttgttaatattcttttgtttttgttttttgttttttgtttttatttttcctgctctctgcttggttcattgtcatcacctacaggcgtactttattgtcggcttccaaagattactaacttttatctgtatcactaagattgaactgccttggctgtactgctattcttactgctgcttctattattgccttcttcagcacaataaggctttcaaaagccaaagaataacaagaaataagcaccattttagaagcctttccactatgaaacttaagctaaatgtgctcaccattattttgctgcctgtccacttgttaataacaatatacagtgcccttatatttattccatggtattttcttaccaatgccaagaagaaaaacgctatggcaaagagaataaaagctaagcccacttcagacaaacctggaagtccatatcgctctgtcacacacttcgactcactagctgtaatagacatccctggagcagatactctggataaattatttgaccatgctgtatccaagtttgggaagaaggacagccttgggaccagggaaatcctaagtgaagaaaatgaaatgcagccaaatggaaaagtttttaagaaggtaaagtattttggtgcttttcatttatgttttaaagaggaagacacatttgttttatcataaatcgagtgcgttttaagtatgctggcattctattatagtgctgtgtaaaactactcagaagccgctcatagcttctgtatgttcatttaagagcatttttagagttttatgctttggatagtattttaattgcttgtttgaatatactaatattagagaatgtatcactttaacagttaattcttgggaattataaatggatgaactatcttgaagtgaatcgcagagtgaataactttggtagtggactcactgcactgggactaaaaccaaagaacaccattgccatcttctgtgagaccagggccgaatggatgattgcagcacagacctgctttaagtacaactttcctcgtaagtgccttgtgtttttggaggggggagaggagggtctttgcttgcatgtgagaattgttttgagatgctcttgttttcacagtaggtgttgtttagccattttacacattaattatgtccataatacggcatgtaatattgtggctaaaagatatccgatgactcctgttaagtatggtaacttgtaagaactaatatgggaattggcagctttaagggatgtgatttacacttttattttccaattggaaatgaattgtaactgaaagagttggagtttgggggtattttgggggggtgatatacaaagagtaatgattaaaagaacaaaaaaccatttctcaggataattcaaattcattgcttcactttgagacctcttatttgacttattctattttacgtgtgaaatatgcatgtgacagctggaattggcattagatatgttagaaagtaaaattgagtatatttctaatactcaagcatttgttgttgccattgtttaagaaataaacaatgtattgtcacatactaagtactctgttgtttgttgaatgaaatataacactgtaagttaggattatagagcttaaatttcaaacaaaaaatagataatatgaaaatgatcccctatgtacccattacccactttcaacgatgaacagcttgtgaaagtggctatttttaaccacattgtttctggttaccaatctagagctgaattttcagttctttctaagtttagcagatgtcctttgattctaactgatcttggtttatgttatctctggtggctcctaaggagtagatctccttgatctctctaattaaggtgtggaggtcaccaatcacattggacattggactcactaaaacagcttcttagaaggagtaagaacattatctgtggctgatcttatgacttaagatcctcaagattttcaaggacttatccattctttggaggctatggccaatgaaagtgtgtatcaagaagaagccctagctgggccagtctgacctgaattaagagttcagccagtacctattggccttgagcatctaaattgacagatttttgatcagctgtggcagtgcgagtgtttctgggtttcttcaggtttaggaagtgagagttctgggaatttgtaaggaaaactttgggctcccagggagtttgaagcaaggttgaaggatggtaacagagactatgaaatcaaattaaaatatacaatgtctttgtgtctctaagtgtaactattattaaagactgacttcaataatatccatttctaatagatgtttattacttaatatttgtgtttatttttattatgtagttgtgactttatatgccacacttggcaaagaagcagtagttcatgggctaaatgaatctgaggcttcctatctgattaccagtgttgaacttctggaaagtaaacttaaggtaaatatgaaattttcttttaattcatggttgcgttgtctggcaggacagaaaaatattcattcagtaagtgaatttttgttgcaggcttaagtttaatagctgtttttttttctttctgctcaacagactgcattgttagatatcagttgtgttaaacatatcatttatgtggacaataaggctatcaataaagcagagtaccctgaaggatttgagattcacagcatgcaatcagtagaagagttgggatctaacccagaaaactgtaagtaaagcagtaaaaacaattttatttacctattccaagtttgttattttggtaggttagggaaacaaatgacatgagtaaatccacaaaagttctttgactgaaaaaaaaaagttcaaaaatctttaaaaaccatcaagaccatatatgattaagattttccctccatttctcctcaaaaaaaataagttagtaaatttcactaagtggttgagatgtaatctgtggttcagacttcatggcagttgctgccaaatgtttcttcattttttaaataacccactataaccttccaatttgggcctcataaaagaaaaatatttcaggccttccattcagtaaactttctgaaataaatgcttaatgctagttatcttaaggatgtttcagaggatgcaaagctgtttaccaagattaatgcttggatttattttaccactgaggtggtagttggtatttcatttgaaacaagtaagtgtaccttgtagcaaaatgtcagttggccatcagggcagagagttgaggaaattaatactccatttgaagagttttcttattatgtttaatgcgatggtcaaaataccatactataatgagaaaaggattcatttttgcaggagaaaatgttggtcgaacctctactcagcttctgaacattttaccattagagaatgagcatgcgtttataataacaggtgttattatacacatctgccatgtgtccagaatggcagagagtcagattttaccctgcttgccggcaaacagatgagcctgcaaaacttcctggtgccatagacttttgggtctgagatgagggacagttttttactcacaacaatagcagtagccagagtatcatatcagcatttgtgtcataagagaggaactctgagcttaaagagcctgaatatcttattatcttattgtactggacagtaagcatgcctgctgtttgctctggggagagacactatctctgtgcaaatatccttgtaaagatagtctggaacaaagtcaatgtctctgcttgcaagatgtgcagaacatgagacccatagagaattgtttttctacactaggttgaccctgtaagattgggataaacttgactgagaagtcctgattggtagggatcagttacagttctgctgattgaccacaaagggtgttggcagcaagctaaggggtcagcagtcttcataattttgtgtgagcaataatgtaataggccacatatcccacttagttctactcatgtctgcaatagataggatacatatgtttttgtggtacagacagttattgtgatgccacttttttgcatatttacttaaaagtgggcagaagcaaagtatcacatgtgcttagattaagaagaatttagctactgctgttgctttggttaatcatcagaggaaatatgcagtccttatttgcttggtttataaactatgactatatctttaaaaagcattaaaattagccagtttaagtgtaactatctttgtttcagtggtatagctcactgttttaaaaaaatgttattttaactggtatataaaaatgtaaataatttgtgtaaagatttttaaatgtgataatcctgttaaacttgtatttcattctgatgatatatatgtggcttcttagccattttggtatattctcggaaggaaaagtggttactaggctagcactatacactgtcttgaaagtggaagctccagggttctgtttaaaacttatcaccttcaaatgttagcattgaagtcaccttaaagatcagatccagtggttttcaatcaggggcatatatgagaatcacttgtggagctttgttctatcccagacatattgaatctgaattttcagaaagggggttcagaaataatattttatttaagttctgcacgtgattctgatacccactagtggttagtaaccacaatctgtccagctgtcttattttagagatgagaaactgaggcctaagaagtttatacacatactctgtcctcctgatactccaaagtcccagaaatctttccacaacattgctctgtatacaacactgtggagaggcaatgcacagacagagattaggttaaacatccagaaaatgggccaaattgagtccaaaatgctcactgtaatcagaatttgataaacatttttgttttctagcccaggctggagcacaatggtatgaccatagctcaccatagcctcaacctgctaggctcacccagtcctcctgccttatcttcttgagtagcaaggactgcaggtgcatgccactgcatccggctaacttttttagtttttgtagcgacagagtcttgccatgttggccaggctggtctcgaaatccagggctcaagtgatcctcccaccttggcctctcaaagtactaggattacaggcatgagccacctcacccagctcgttttgatgatttaaagcaaatactgtctattgatagcttatcgttatgcaaaatctaaatatcctattattctttagtaatttaacttttgaactgaagtaaatgtgatatttttcattcattcatttagtgggcattcctccaagtagaccaacgccttcagacatggccattgttatgtatactagtggttctactggccgacctaagggagtgatgatgcatcatagcaatttgatagctggaatgacaggccagtgtgaaagaatacctggactggggtaagataattctttaactttcttcttagaaatcagagttcatgttcagcattctctaaactcaatctatattaaaatgataaagctcttggtatttctaacttcaaatgccttttcaagaatggttaaaatatttctcttattttgttttagaccgaaggacacatatattggctacttgcctttggctcatgtgctagaactgacagcagagatatcttgctttacctatggctgcaggattggatattcttctccgcttacactctctgaccaggtgacaaacttttcagtatattggcatgatcgtatgatgctgcatggtttggctgagaacatattactaggactcgagatattttaattcagctaaagctttctccttgacctcaaaatagcttccatgaacaatatgtagctataggagattaccctgtagatttgttagcattgctttagctatatattttaaaattattttttttttcttttcttttgctctgtcacccagactggagtgcaatggtatgatcttggctcactgcaacctttgcctctcgggttcaagcgattctcctgcctcagcctctagagtagctgggattgcaggcgcccgccaccatgccctgctattttttttgtatttttagtagagatggggtttcgccatgttggccaggctagtctcgaactcctgacctccagtgatctgtccgcctcggcctcccaaagtgctgggattacagatgtgagccactgtgcccagccttaaaattatttaaaaatgaataattacttttatctttttctactagatttttactcttgagaactacgatagagaatataaatgcaatgagcctttttgacacactacccatgagcattggtgggtttctgggaggagatatgttagggtcttggcccagttttcccgagatttttctagagcagtaccgtctgatacagtagccactaggcagatatttaaataaaaattaagggccgggcgcggtggctcatgcctgtaatcccagcactttgggaggccgaggcgggtggatcacaaggtcaggagattgagaccatcctggctaacatggtgaaaccccgtctctactaaaaaaatacaaaagaattagctgggcgaggtggtgggcgcctgtagtcccagctactcgggaggctgaggcaggagaatggcgtgaacctgggaggtggagcttgcagtgagccaagatcgcgccactgcactccagcctgggcgacagagcgagactccgtctcaaaaaaaaaaaaattaagtaaaattgaaaaaaatttttttatttgctttagccacatttcaagctctcaatagctacgtgtgaccaacggctaccatattaggcagcaaagataaagaatatttttatcatcacagaaagttctattggtaggggctgaggcatctccaaaggtagtctcagctcaccatactaagttaggattcttccttctctctgtagttcatagcagaaatcccaacaatgggtggggctaactcatatatgttatacccatttgaaattacacacctaatactattgtccacagttctgttttatgtcttctttggaatagttgctgtagaaaagcttcaaccaggcttaggggaaaaaaaaaaagagccactaaagaagctgtggggttctggatgctgaaagacaaagcaagtataggtaggaatgacttgtctatacgtggctctgctcctccaacactgggggcccagctgttgtttttcagaccgccccccaccaggcaatgctgccttttgtttgagagtctccatggagcatgtagttggtaagatacgtcctcagtgttcacagttagaaattgtaatactttatttgtagaaataccattttagggagaggctagataggttgtatactattaaaacaaaaaaagttaaatagttttttttggacttgagattccaatcacctttgtgttttttttttttttgatatatgacttaaagtgcacaaatattaagtgtactgcttgatgagatttaataagcatatacacatatagacctctgtgatcatcaccgtctagattaggaaaacaaagaacattttcagcacccgtgaatgtcccttgggtcccctcctggtcattaccacattggattctctttgaaggaagaatccagccttcttttaaagtggctttttctgtgagaacgcattctgttccaaacaactcctagctttgtactttaagaaacacaatctttgtatgacagggtgctgctgtgtttgactataccactcagctataaattcacacttaaaatctgctagaatagtaatggtatgaataaatacactatccgattgatagcagaacttgacctggtgaaatcaaagtagacctatcaataagactaaggcttaaactctaaaacaaatttagtaaaatctctgatcattatgttttgttgtcatgggtttttcttatgctcagagacattatcaaaatgtagaaaacatttcagtaaactttgagtataatttttttttccctttgtgaatttggaagccaggactagccgttctttgatttttcactgcctttctgagaacaatagcctcagtgtgggaaaggagggacagttggagtctgttgctggtctgacttaattcttgctgtctcttaggctaagctagtacattagaagcctgttcagtaaaattcacacctactttttaaatgaactttactgtaaagactctcaatcttactaggaatctaaaacactggaacttgcttcacataggaaatcagaaggatgcaggagactagaagcaccacatttggagccaactgatgatagcaatattgtcataaccaggattactatgatcacaagaagacaaaataactgataaaattactaagagtaaaaaaaacaaagaagggcttcttgtggcttctgctatcctggaactgctctctgtagcaagagctggtcagtagcatgcagagggcaactccgacctgaaggacatgagagcccattttgtttctgcagagcagccctcctgtgtgtggtgtacatggtttctgtgtaggtttccacttgcaaatgtgcacatccttgcacatatgtaaaatgagttattttatctcctttatccatattaaagaaaagtaggagaaaggcaacttagttctatcgggagaaccatcctctatatggccatttgtgcacatttatgtgtatctctactttgtccctggcagtgttctcagtatcttaccaactagaatattaccaaattagagtttcagtatgatgttaattgatgttcatagtggtgtcttcaggatgtggctttgcctattgttaatcaaagaaagttaaaatcaccttcaattttgttttagtgttatatctgtcttaatcaagtttttttgaaaatgtagtaatagtctgtgctatatttgatagtatgttattaataagaatgtttgattcatcacaatgtcattctcttgttatcctggatcaaggtttctcctctaaggaaggtgaaatgtgctagaagcagttatctgtagcactaaaatacttacatttgagacttgtaggttatgatagttgttaacagataatcacagagcaataaaagctcaaattccaagtgtaacttctgtatttgttattaatacttgaattacaacatgttttaaggttggttttcctgatcatatttattttttctttaatatagtccagcaaaattaaaaaaggaagcaaaggagactgtactgtactgaagcccacacttatggctgctgttccggtgagtacagaatatgaatatgaacataagaggattgtttatataatttattgatcgtacttggaccttttaaaaagtaatactcttagatatgtctacattttaaaataattttaccttgttgaaatcacagcaaatgtgttcattaaaatcttaggtaccatactagggaagacaaaatggcaagattttgaaatgcacgcctgtttgagtttgctgatacatgaaaattaggtgatgaaaatgacctagttcaggttacctactgtgagaattggtcagaccgttttaaggtagaatatattctaaagatcatcttgtttaatctcttaattaaaaaaatgaggaaactttaggccatcctagggagctgaagaatcgtatacaaggtcaaggatctaagccctcccaactctcttatggtgattaagtaaactgaaaattggagagagctcccaaaggaaaaaagtttaattctatatattcggaatcttcatgtgaaatactgccttaaaaaaaaaagatgttacattttatagccttgtaatgatgaattttgaaacatttaacaccatgtttcagatttgtgtaatcaaatatgttctagctttttttatgcttcagaaacttcagaaagactatgtatcactactgcttatattatgatcagacttgaaatcttaccccaatatctttcacagaattacttttgtatatggaaactctgagattagataagaaagtgttcagtccaagttgttctgagaattacagatggaagatactttatggtccttttagcttctaattgcaaaattaccaaataacaaagaagtagaataggtcagagaagactttgcctttttatttagaggttctgtgtaattcataaagttttcaaacagaaagaagaggcatctgactaaaaccataaaaaagttgctaataatagctagtgcagtgcttcctatgtgctaggtaggcactgtgcaaaatgccttagataaattatctcacttaattctaagactgcaaggtgggccctgttactctatcttataaagaaggaaagttgccccaaagccacacagctcataggtgatggaatcaaagtttgaactctaccaatctgatactggtggagtatcagtctatcagtcttcttaaccactatggctgtctatttaggactgtttcacattcagaattccctagcaaaccttatcagataacataggaagaggtaagagctgaggtgttaaagaagtaatctccgattttaggcctgaaggataagcacagttagcacataggctccttatcctctaattgcccattgtccattcttccctgctttactttgtgtcttgaggggctatgttctgtgcacgaattaccagtgcatccttgccttatgacttctggttgggttcagccaattggagggcctcatgagagatcagagggcagaaagatagagagtctgcacacttattacctttgctcctttcctgctgggctgcaaattttagcagctgtcaggagaccctgttggatagtctccttcccgttggttgtaaccaggtctttcccatggctagagtcctcatccaggttccaatgacacttgtcttatgtcttgcggcctcgagatagtaatgttccctatgttgctagtccattggcacctcatcaaatattattgggtttcctttttagcccctcctgtttctccagaaataggccatttaaaaaaaaaacaactctttattgagaattatttttggtagagtctgttttttgagtttgtttctttcctgggtcagaatgaaagattgattgaatactataacattcacagtgaaaattcagaataagtcactacttatcagctgtggctccattgaacatcatgtaatgttaggttgagataaagggtgacttaatgtgctaacaataaactctgccaatgtgttacaactgtattatgttccttactcatcaaggccttgctgatgtctatgattagtatccagtgctggaaggagcagtagacatggttctcacacatctgtctcattcccaagcccctgccccctctcccctccccacccccattttttttttaagatctcatatactttttaagaaggatggatataggatgctcaagtcctgctagggaatgatgggggattctgtcacagatgtagagaaatatttcagttatataatagtgattccttttgtggaaatggagaaaacaatattgtaccatgtttgagtgctatggtaactttttttttttttttttttttttttagtatttattgatcattcttgggtgtttctcagagagggggatttggcagggtcataggacaatagtggagggaaggtcagcagataaacatgtgaacaaaggtctctggttttcctaggcagagggccctgccgccttccgcagtgtttgtgtccctgggtacttgagattagggagtggtgatgactgttaacgagcatgctgccttcaagcatctgtttaacaaagcacatcttgcaccacccttaatccatttaacccttagtggacacagcacatgtttcagagagcatggggttgggggtaaggttatagactaacagcatcccaaggcagaagaatttttcttagtacagaacaaaacggagtctcctatgtctacttctctctacacagacacagaaacaatctgatctctctttcttttccccacatttcccccttttctatttgacaaaaccgccatcgtcatcatggcccgttctcaatgagctattgggtacacctcccagatggggtggcgacctggcagaggggctcctcacctcccagacggggcggccaggcagaggcgcccgcctgccacctcccggacggggtggctggtcgggcgggggctgccccccacctcccggatggggtggctggccaggcgggggctgccccccagctcccgggcggggcggctggccgggcggaggggctcctcacttctcagacggggaggccggtcagagacgctcctcatctcccagacggggcggcggcggggcagagacactcctcagttcccagacggggtcgcggctgggcagaggcgctcttcacatctcagatggggcggcagggcagaggtgctccccacatcccagaggatgggcggctgggcagagacactcctcacttcctagacaggatgacggccgggaagaggcgctcctcacttcccagactgggcggccgggcagaggggctcctcacatcccagacgatgggcggccaggcagagacgctcctcacttcctagacggggtggcggccgagcagaggctgcaatctcggcactttgggaggccaaggcaggcggctgggaggtggaggttgtagccagccgagatcacgccactgcactccagcctgggcaacattgagcactgagtgagtgagactccgtctgcaatcccagcacctcgggaggccgaggctggcagatcactcacggtcaggagctggagaccagcctggccagcatggcgaaaccccgtctccaccaaaaaatacgaaaaccagtcaggcgtggcggcacgcgcctgcaatcccaggcactcggcaggctgaggcaggagaatcaggcagggaggttgcagtgagtcgagatggcggcagtacagtccagcctccgctcggcatcagagggagaccgtgcaaaggggaagggagagggagagggagaggagggagaggagggagagggagagctttttttttttttttgagacggagtcttgctctgtcacccaggctagagtgcagtggtgtgatgtcggctcactgcaacctccacctcccgggttcaagcgattctcctgcctcagcctccctagtagctgggattataggcgcctgccaccacgcccggctaatttttgtatttttggtagagacggggtttcaccatcttggccaggctgatctcgaactcctgacctcgcaatccacccacctcagcctcccaaagtgctggaattacaggcgtgagccactatgcccagcctgtggtaacctttttaagggatggttctgctgtcttcatttgtgagtggctctattctaatattgaaagaactgcccattaagttattcattatagcataccttaatttgtactgataattgatattttaagtatttggaaacacgtatttataaacagatgtgctttatgtaataattcttaatttgtgttaaataatttcaagaaaacatcatttagtggtagtctgggctgtttgctgtttatttttttttgttttgttttgtattaaccttagagtcggtatatcttaaacctggtcctacctccagttttccaagtttgtgtgagcaagaatcgtgttctttgcttccgttaaaatgtaatagaaatgcttaaactatagatacttaggattttaagaaactaatgctttctgccatgctgtaagaaggtcacaaagttgtagtaaaaaaagagaaaagcatcatgaatagattcaacatagtcaggtattttggtactgtttgagaataagtgaatatattgtaacagagattaatttttttttctgcgacagctgagtgaattctctaaactcgagctaacatttcttaaaaatttagattaacttggctgggcacggtggctcacgcctgtaatcccaacactttgggaggccgaggtggcggatcacgaagtcaggagttcgacaccagcctggctaacacattgaaaccttgtctctactaaaaatacaaaaaattagccgggtgtggtggcaggcgcctgtagtcccagctactggggaggctgaggcaggagaatgggatgaacccaggaggtggagcttgcagtgagccgagatcccgccactgcactccagcctgggcagcagagtgagactccgtctcaaaaaaaaaaaaaaaaatttagattaacttaatgtatagaactgaagaaacccctatatctgtccttagtctttttgaagtagtgaacaagtagtcagtgaaattaattacataattaaagaaacaaatatgtccattatgctaaagacttttacccaagatgttgcaagtaaggtatcttcaactaaagactgtctccattcctttcagattattgaatattttgtttaactttcaggaaatcatggatagaatttataagaatgttatgagcaaagtccaagagatgaattatattcagaaaactctgttcaagatagggtatgattacaaattggaacagatcaaaaagggatatgatgcacctctttgcaatctgtaagtacatttcataggctctgtggtttgagcctttaaatttttttatgcttttaaatccagaagatgaataaataaatggcaagttaattcatttgaatatcaccaccatgatcataaggttgaaattctcttttattctaagtcttattgtttatacagcaagcagaggactctgatcttggcaatttaacaaattttaataattgagtgtatatttaagatttatttataaaatttagtttcatgaagaaaaactaaaatagacttttgaatcaagacacttgagcttaaaaaatgtcatttctaactaaaaaaagtgacctccattgcatgaaggtttctgatttattgtattcataaaatagtgtagtaagtatatgaatataacttattttaaatgtgatgctgaggagtggggatggggaagcattttttattggaagtgagataagataggtgattaaatgttccaaagataattaaaatttttttacctctgatgtctgttttctttcatttacttgtgtcagcatagtttcccgatgctacacattatctttcttcatttttaaagagttttttctggcatttttacaaggcgttactagttgttgccttgttaacctctcattctcaccgtgattctgacattgagatgttcaaccagttgaggaatctttcccagagcttataaattagtgtgttgccaagaataatgtatgcgtacattaaaatcatttatcctccctttattaaggttactgtttaaaaaggtcaaggccctgctgggagggaatgtccgcatgatgctgtctggaggggccccgctatctcctcagacacaccgattcatgaatgtctgcttctgctgcccaattggccagggttatggactgacagaatcatgtggtgctgggacagttactgaaggtaagcattattaatgtggtaaatattctgtatcagctgctactaataaaatacattcgcattacctttggaaaccatggtaactttaaaatacctcttaactaatatcagattcattgcaaatcagtgtagttttggtttatgaattcttaattataagtatcatgtggaccctttcattttaagccttataattttttttttttttgagatggagtttcactcttgttgcccaggctggagtgcaatagcataatctcagctcactgcaacctccacctcctgggttcaaacaattctcctgcctcagcctcccaagtagctgggattacaggcgtgtgccaccatgcccagctaatttttgtatttttagatggggtttcaccatgttgaccaggctggtctcgaactcctgacctcaggtgatctgcctgcctcggcctcccaaagtgctgggattacaggcggtgagccaccacgcccggtcgccttataaatatttatgccacacagtcggtcctcaaaatcctgtcaccctggtcctttagtcttctttctctaaatgatcacttctttggagaactgtactattaaaaatgaagtatcacttttatgctccctcttaaatctgtgttcctgtcctaacttcttctttggtttcccttttgttattttcaacagcctgaagcgaggtttcccaaccctgacactgttcaaattttgaatccgataattctttgttgttgagggctgttgtatgcattgcagaatatttagttgccaaagcagatgtttatgggctcaccccagctgtgacaatgaaacatatccccaaacattgccagatatcccctggggggcaaaatcactttaggttgagaaacactggggtataggaattgtttttttggataatcttattttcgctttaaactcattgtgtccaaaatcaatgccattattctaaactgtctctctattgacaaattatttgtttgtgtcaatggtgataccatccttaaagtcattccaggtatcagctttgaagtcatctgtttattttaaaatatctttaaatgtcatcagatcattccttcattaggtttctcctttccctccatatcacctctgtcgtccaactttttattgctccattctgctccgacctaacagcctttttatttttgagacagagtcttgctctgttgcccaggctggagtgcagtggcacaatctcagctcactgcaacctccgcctcccgggttcaagcaattctcttcccttagcctcctgagtagctgggactacaggcgtgtgccaccacacctgactaatttttgtatttttagtagaagcggggttttaccatgttggccaggctggtctcgaactcctgacctcaggtgatccacccacctcagcttcccagagtattaggattacaggcgggagccactgcgcctgccctgacctaacagccttgtaacagctgtgtctgcctacattacatcacttctgatttatcctgtatccttctattagatgcatccacctcatccactgcttgatacctgatgtatcaaatctaaacacctctttacctagctttgacatctttaatctgatgctagtgtacttatccaacatcattttccattattccccacatatacacaatgcctggctcttctctccagacccaccagtcttcttactgtttcttatgaaggcattcttggtctcacctctatgtattttcttttcccttctcttggaatgtcctttttgcttattgatcacaaccatcttttaatgcccacttttcaataatgtctttcctaactacttcattttacattcattgtttaagtctctaagctactattgtgcttaccttcagtgcccatgcagtttagtatttaaatgttctctgaattgtttcacatgcatttcttcccagttcatttgtaaggtcattgagtgcagggtctccttatctctcatgtgctgtttacataatgggctgtccataaatatttgtttattgctagcaataatcacaaattgcaaatggatatcatcatcatgatgatgtttgacaacagcagctaacatcttttgaaggcttagcttgtgccaagaagtgttaagcattgtccatgtatcatctcatttaatcctcacagcatatccctgtatgaagtaggttttgttactatctccatttcatagatgaggaaatggaggcttagagaggctaagttacttgtccatgttacatagccaatgagtggtagagcaggaattccaatcaaaatctatcttatgacaagcttaggtagataacggtggagccatctctcctcctttaacagatattttgtacttaattacataaaatataaccatgaaaagcaaaaatgatgtaacaacaatggaatccattgcactattgaagtggagttgaaatactgaaaaatgatcacactttgcactccttcttttgtcatttttctgactctggttctaactctaatattcccagtgcattggtacaaatctggaatgtggtatgctaatatctctgttactttttccctcacagtaactgactatactactggcagagttggagcacctcttatttgctgtgaaattaagctaaaagactggcaagaaggtaagaattttatgaaaagctctagtgattcaagatatgctgaaaactactgtcagctttatgactttcatttctttaaagtctggggaagcaaataattctctgctgttttgctgttgcctgtccccatgcattctttttcctcagtgatatctttaggttcccaagaggaaaataaaatctctagaatctaggattaatgattctgaacttgacaatacttgaaggtaaagagaaaaaaaattcttactggagctttctgggtttggagaaggtgaggatccttgaaacttgactttactagtgagaatgtttgggctgagaaaccccagatttttaggggatagaatgatgggttgcactcatacacacaccaacttcttagatcttgatcccagaaaagattttcatagttgagactcaactgtccagctatttgtatagttgaatttttatatgtacctgcacagacaagccacttagaagaaaactagagacattgatgatcatcctttctataaattagctgaaggcaaatatcaaccagtcttcttaatgaaagatactaaatatacacagtaactacaataaagtagattgttaaataaaacaaataattaacagcctagccatgtcagataaaggaagagtaattaaaatgcttaagattttaaaagagaatatttaccttaggatggaacacggactaaaaatttaaagtacaagttaccgtgtaggatgcaacccttaggttgtccaaaccctgagaaaatgaatacgtttttatctaacataaactttaagtttctaaagcattttttattatgtgtgttattgtcagtgctttatgagcaaatgactatttcttttttaaaaacacattttaaaaagccagttgcattcccaagagttttacaccttgggacttagtcttccctttttccatggtaatggcattccaattttaccatgaaaatctgaagaaaatagtttgtgtgtatgtgttttggacatcaacatcagaattattttattaggtaagtttttaattgttaggcagtggaatcagagaaatgtttaaaggcaaaaatctccttaccaagttttactataatttttattttctgatttcctggtactgggccttaatgtcagttttggggagtaggtcccttgttgaacatgtatttggagttttccttgctgtgaagactctttggctttatactgtatgaatgatctcagtttttttttaacatacaatgggttttatcatgttgaaatattgaatagttttaagtttatcagagcagctaacagctgaaaggaaccctgattttaatccttttatgacacaaaatctagtctatatcttattttgcaaatttagatttttgtatattttccttaaagtaagcttccttcagtaatacagaggtaatgagtagtgatgaaatatattagtatttattatcaattagtttagtgtttgaacttctaaagtcatgactggccacaggcaaaattaatacaattttcttcctgtttcccatagtcccccctttccctctcactttatgatgctaccatttttgggtacttactgcatgttctttttggttaaaacctccttagaaaaaatttgaaatgcattgatatcagtatgtcagtaatttacttataacagcttcaagtgttactcttcctgggggtgattttatcttaacagaactctgtgaacactaagctctaatggtgttctaagtgtgaaatgttatggtatgggaaggtttgagatgggtgattgttggtggtgattatcattgagcctttcttggtgttcttaaaatcacagtcacccagtatcctcatgtaaattttagtaaatataaactaatgttctctcataaagtgatataaaatctgatcagcagaaaaatactaacatacgtataagctttaagaattaatgaaatttgttgtagaacaataactaatttacttttatgatttccaggcggttatacaattaatgacaagccaaaccccagaggtgaaatcgtaattggtggacagaacatctccatgggatattttaaaaatgaagagaaaacagcagaagattattctgtggatgaaaatggacaaaggtggttttgcactggtgatattggagaattccatcccgatggatgtttacagattataggtcagaatgttttctttttatggttttctttagtttttataacttcagtatatatgaaaggtaatattgatcagtcattaataaagttgatggttccattagttcaaactttggacaagttatttaacttatgtatgagcttctccatcagcaaaacaaggacaataccaacctcatagggctgtcgttaagattaaatgagttgatatatgtaaaatattctaaacagagcctgaaccttagcgtaagtactagcagcactagcaacagcagcattgagtgtagagagaatgggcagggaaatagcaaacaggtaatgagaaaacaaaaagagctcagaggacgtctttcttggtcaaccacatgtgattttatataactgtttcctataacatactctatgctaggccttcctcactcttcacctctccacccaaggggcagcatgggcacatatatttttttttactgttggctatttatatgtgtctaacgaggcctgaaccttagaaaattaatatcaatccttagcactagtcagttctgagaatgtcagttactttggcattgtcctcattgagtctactgaagtggacctttatgttcaaaaaatgactccaaaatgggcccttgtgctattcacttggatgaggcaaaagttaaaacttgctgatgagaacccctcagcaagatcccagtcaggtcttttttaagacatagagtttcctcacctatatgtagtgactgatttcaatccatcgctggacctcacgatatctgacctgaatatagttagagatttcctgggaaaattggttcttcatctagaaatttgaaccaggaaccatggttcagttgagaaacaataagcttttttcccccttgttccttaattgcactggaatcaaaggttatttctgtagagtgggttcccaggctacgggtaggcaaatcagcactcatactcattccaaggccatgtgatgattattcaagctgtgccatcctgtgctagcactttcttagagaactgtcattttaacaagataatgtcaaaagtggaaaaggagaattaacatgtgttaaatgtgttctatatgccagacattgtgggatatgtctgtatgaggtaggcatcattatcctgataaaacttgaggattagaaggttaactgacatgccgaggatcacttagctagtaccaggcagagttaccattcagatagaatgttccaaagtcctagttccctctattaaattgattataatatttaagattataataagatgctaaagctttgggtttaaggtgtaacttttagccaatacttacttaagtaggcattttatttttaactggtgtgtatgggcaacattatatatatgcagtttttgccattttaaaagtaatggcaaaaaccacaattacttttgcaccaacctaataataattttagaagaagtagttttgtaaataacgattaaggcaatgatattcaaagaagacagtcagaattgcatataccttagttaaacagacttaacattctttatgacttaacagatcgtaagaaagatctagtgaagttacaagcaggagagtatgtatctcttgggaaagtagaagctgcactgaagaattgtccacttattgacaacatctgtgcttttgccaaaaggtaactttccaaagttgtattttttgtttcgtaagtcaaaagatatttagaaaataatgtgattacatattatcataagggtaacatagtcttctcttagaattttcatcagatctggggaattgtacatttatgtaagttagtgaattcaacagcttaaagatcattttagataactcagacgtgttaactatttattggacacctgcatcttgctaaatacttagctatgcaacaagttatttcatttaacatccatgacaactgagacttagtataagtaattttcccaaaaatgtaacacaactactacatgttgagatgaattttgaacccaagtttttctaaatcaaaagcctaagagattgagccattttctttatatgttgatatgtcttatttttatgggttttattcttttttaaaaattgtaattgtggtaaaaagcatataacgtaagatttaccatcttaaccatttctaaatgtacagttcagtagtgttgtgtatatttacattggtgtgcagccaatctccagacctttttttcttgcaaaatggaaactctatacccattaaacagcaactcctattcctcctccctccttcccctgggaaccaccattctactttctgtttctatgaatttgacttctctagaaatctcacacaagtagaattatacagtttttgcctttttgtgattggcttaattcccttagtataatgtcctcaaggattatccatgttgtagcatatgtcagaatttccttcattttgaaggcttaacaatattccattgtatccatataatgtattttgtttatatattcattgtcagtgcacattttggttgcctccccctcttggttgttgtgaataatgctcctaggaaaatgcgtatgcaaatatctctttgagatcctgctttcaattatgtggatagatacctagatttagaattgctggatcatatgacagttctatttttaattttttaaggaactgcaatactgttttccatagcaacagcaccatttttacatttcctacaacagtacacaaacattctagttcctccacttcttcactagcacttgtttgttttatatagtagtcatcctcatggatgtgaggggatattttgttttagttttgatttgtattttcctaatgattagtgccactgagcaccttttcctatgattgttggccattcatatattatcgctggagaaatgtctattcaagttctttgttcattatttaattgagctatttggttttttgttactgagttgtggaaattatatattctgtttattaaccccttatcagatatatgatttgcaaattttttttttctattccatagattgcctttttactctgctgattgagtcttttgatacacacaagtttttagttttgttgtagtcccagttatctgttttttgcttttgttgcctttgcttttggtgtcacacccaagaaatattgccaaatctattctcataaagtgtttcttctgtttttttttttctagcagttttatagttttatcagattggtgcaaaagtaattttggtttttgccattaatgtcaattacttttgcaccgacttaatagctcttcgatgtttagatttttgatccattttgagctaatttttgtatatgttgtaaggtgaaggtccaccttcattcattgcatgtggatatccagttttcctagtaccatttgttgacgagactgtcctttcctcattgagtggtcttaacacccttgtcaaagatcgtttctccatagatacaagggtttacttctagtttctctattccattggtctatatgtccttctttatgctggtactatgggttttatcatttcctaatgaaactttaataaataagagaaatatatatttggaattatctgtactgtactatgtcattgactagtttatgaataacttttctcaatgttttcatttctattttattttctgtttttttagtgatcagtcctatgtgatcagttttgtggttcctaaccagaaaaggttgacacttttggcacaacagaaaggggtagaaggaacttgggttgatatctgcaataatcctgctatggaagctgaaatactgaaagaaattcgagaagctgcaaatgccagtaagtaagaaattgctagactggtatagtccctaaaagtcatctaatgatgtcttttgcattaggctcttcaatatgtttgctttaataataaaatacaggattttaagaaacctatttcttaaatatgtataatggatttccatgttggaaggatccttcaatgtcatatagtagaataacctatgtagttctttattgcatgtttcaacatctttcccaaagtggtcatctagcctgtgtttggaatggtccatctttgggtagatctgttatataaatctactttgtgtctgtaaagcagaaattagtaactctaagtttagtaaatagtgttataaccatgattatgctttgtgtgtatactgtggctctgtaaatggactatcttcagatggtacattaataaccaattggagaaaatctgcttatatagtatatgccaggaattgtgttacacactaggaatacagaaagtagtaagactcatttcttgctctcatgtagttcattatcaggtgagaggggcacatgagagagacaacaatcttaacagcaatagagagatgaacagagaatcatggtaccacagatgagggtacctaacctacttgggaggacatggaagagatgtcacttcagctcatccttaagggttaattagaagttaactaggttgggcattctaggccaagaagcaacatgagaaaggcaaataggtatgaaaaggatgatgtgtgcagggaactacaagggagtctggtgttaccggtacagtgcaaagtatgaggtaaggctgtagaggttagcagaggccaagttgtgtagtaccttctatgcttgttcagaaatttggatgtaatcctgtagacagtgaggagccattggcaggttttactaggttagtgatgtggtcaggtttgcattttggagagatgcagtcactctggaggccatgctgcagatgaatttgagggggactggactgaggcagaaggccagttgaagaggactgtaggagatacctagactggggggtggtgagtaatgagggcgtgaagcagggaatcaggaaatgtttatgaagcaaaattggcacacttcagtgattaattggataacatagataagggaaaagaggagtctaggatagcccccagatttgtagctgaagcgacaaggtaaatactactactgattgagctagaaaatacaagaggaagagctggcatatacaagaagatgatgaggtcagtatgggatacatgtagtttgaaacacgttttgacaaccccatcaaaaagtgggcaaagaatatgaacagacacttctcaaaagaagacatttatgcagccaacagacacatgaaaaaatgctcatcatcactggccatcagagaaatgcaaatcaaaaccacaatgagatgccatctcacaccagttagaatggcaatcattaaaaagtcagggaacaacaggtgctggagaggatatggagaaataggaacacttttacactgttggtgggactgtaaactagttcgaccattgtggaagacactgtggtgattcctcaaggatctagaactagaaataccatttgacccagccatcccattactgggtatatacccaaaggattataaataatgctgctgtaaagacacatgcacacatatgtttattgcagcactattcacaagagcaaagacttggaaccaacccagatatccatcaataatagactggattaagaaaatgtggcacatatacaccatggaatactatgcagccataaaaaaggatgagttcatgtcctttgtagggacatggatgaagctggaaaccatcattctcagcaaactatcgcaaggacaaaaaaccaaacaccgcatattctcactcataggtgggaattgaacaacgagaacacttggacacaggaaggggaacatcacacactggggcctgttgtggggtggggggacgggggagggatagcattaggagatatacctaatgttaaatgatgaggattaatgggtgcagcacaccaacatggcacatgtatacatatgtaacaaacctgcatgttgtgcacatgtaccctagaacttaaagtataaaaaaataaaaataaaaaacacgttttggataatcaaagttaaaatgtccagcaggcggttgtgtgtagtccaaatcttattgggagaggcctggactctgctatagactcggggataattgaaaccacgaaagtagatgggccaaccttgggtgagattgtaaagggagaacaggaggctgtggatgggtctctggataacaccagcatataaggaatggatgaagaaagagatgtgtgtgggaagcatgattggcaagatgccaggagagcaatgcccatgcagaccactgctaagagagtttcaggaaagagagtaatcaacagttttacattagcagaaaggactgacaaagcttattggaacattgattggaaaattaaagagattaaaaattaatgctcaagttcaatagtaggctttttttttttcttttttcccaacgagggattccatgtgggtggctgattttataacctttttttaagtttcagttttatcagtataacaagtatatatagtttaaaaaatgtcagtattaaggacttgcaacaaaaagcagcccatattgtatccctcttttccccaagtctcatctgtcttcaactttagttgtttttttaaagtttctggcattcgtctccatttttctaaagaaaatggttatgttgctccttcttgaatttttcatttgcgatgttatggacttttatggacctctaaccatagaagatgatttacctttcttatgaccattctccttgccttccctaccacactttttcttttccaatagatagtacaatttgcattttacacccaggtttccgttatgattatgaaaatattcacagctgaactacatagtgttttatgattatatttcctttcttggacaattttttgtgtttccctggatcttaaaatttcctctcttcattagttttttgtatactattcttaactcttccactaaactctgttaaaattgtaaaaattctccctaatacaggaaaggatagcatgtctgtatttttgttctcggagacatacttcttagagccctttatcctcatgctgaaatttagactatttgcttccaaaggcttccctttactatcatcctgggaatttcctttgcttctctcctatgttggatcctgtttcctggatctcatatctgtctctttcctggtttactcgccggtttgggtagagcacatccttcagcagcttcctgagaaaggtgcatgggaggtaaatttttgagactgtgcttgcgtgtctgaatatgtttttattctgtcctcacccttgagatgtgtcttggcatattttagagtgataaattctaaatcatttttcctgaatactttgcagacttggctttgttgtcttccagctccagtgttgcatcctgattcccattcctttgtgtatgatctattttatctctcctagctttcagagtcattatgttaatttctggtgttttgatagttcataatgatgtatcttagtgtgggtctttgatcatttatcattgtgcatacttgctgtgggccctttccatatggagatctctgcccttcagttctgggaaatgttaatttatcttttgtttgttcatttgtttttttccccataattccccccaccctgtgtgtctgtttctgagactacttttatatggctgttggacttccagctttcatcctctaattttattatcctttttaaaattttctatttctctttttgttttatattctggcagagtctctcaactttatcatctcttctgtctactgaatttccaatttccactatcagaattttaattttcaagagcttgttcctgtcctctcagtgttccttttaatagcaccctgttgctctttcatggatgcagtcaatgcattgtctcttattcctctgaggatattaaaaggaatcctttttatgtagttttcttctcctgttattgtctcttttacctccaagttgcactttatgcttgccttggtcattgagtcccaagtgtctgctgatccttgtatgtccatattcaggaaccaggtactaaaaaactgtttggaaagcttactgggcttcactgaaaaggcattccaacgttagtgtctttttctcttaagtcattctgtttctccaaaggagatttctccagtcttttgcccgggcaatattagcctgactgccagaattctggtagccaaaagaggtaaaggagttattgagggggatgggagagcagtgggtctcaccctcactgaatccttctcttttcagccttactccctccttctgttgtacctaatgtccatgagtcccgagtctctgcttcagtttttccaaaaagtagacctgcctacaaatggctttgagaagagcagcatagggtgcgggagaacttttctctaaacaggctggagaccagtgctgctctttccagctttacccctcatctcttatcttcagaggcacaggcttagtgggcacttgcccgggctctactatgagggcagtttgctgcttgttggcaacctcttttgttggtagttgctttggcttcctcagccctaagttaattaccacaaattcctttgctttttgtcttctaagattttgttgcactttctcattcagtgcccattttctcttgtttcactttttgccttgtggttaatacctttttcatttttaaattattctaaacaatttaaattcttttttaggcagaacagagaaaaactatatactcttcgtgttttgttggaagctgttaacctaatttcaacccattgtttttctcttacaaataaaaatatcatttttctgattataggttatctatattcattataaaatattggacaacagaatattacaaagaaggaagtaaaaatcacttgagagtagtttatctttgggtggcaagattacattttggtatatatacttaagctgtcaacataatcgaagtttttctgtgtcagtaaatagaaaattacggtatcattttaaatactaaatagtcccagtgcataaatagccatttaagtccctattagatttttaggtgaatttcaccttcttccccatcactgtaaacaaatataacacgaatcttgtatactccattattttcttatgtgattattttcttagtgtgaattcctagaaacagaatttctgagtcaaagagaatatatatatatatattttttcaaataaatttttttaaaaattattattatactttaagttttagggtacatgtgcacaatgtgcaggttagttacatatgtatacatgtgccatgctggtgtgctgcacccattaactcgtcatttagcattaggtatatctcctaatgctatccctcccccttccgcccaccccacaacagtccccagagtgtgatgttccccttcctgtgtccatgtgttctcattgttcaattcccatctataagtgagaacatgcggtgtttggttttttgtccttgcgatagtttactgagaatgatgatttccaatttcatccatgtccctacaaaggacatgaactcatcattttttatggctgcatagtattccatggtgtatatgtgccacattttcttaatccagtctatcattgttggacatttgggctggttccaagtctttgctgttgtgaatagtgccgcaataaacatacgtgtgcatgtgtctttatagcagcatgatttatagtcctttgagtatatacccagtaatgggatggctgggtcaaatggtacttctagttctagatccctgaggaatcgccacactggacttccacaatggttgaactagtttacaatcccaccaacagtgtaaaagtgttcctatttctccacatcctctccagcacctgttgttccctgactttttaatgattgccattctaactggtgtgagatggtatctcattgtagttttgatttgcatttctctgatggccagtgatgatgagcattttttcatgtgtcttttggctgcataagaatatatattttaaagacttttttcctcattgccaaattgctgcctctccccaggaaaactgaaccggcttatattcctatcagagatatatgaatatacctatttctctaactgggctcctattatttctatttattaaaaatgttaactacttaggttacattttggtttaaaaatatagtttatagtaatagtttttctacctgaaaactaatttctccccaagaataattttctgaattctagacactgtgaagttttaaataacaatggcctgttaacataatcagattgaaaaagcttatttattttatacctataaaaacagtgtgacatgtattttatacttacaaaaatagtgtgacataatatttccttcttcaaggtggttttgttacaatattattgatataacacacttttatattaatgaaccaggctcccagaaccttttttgatacaaagcctgatttgctctcaatatagtatttctaaaaatatatagtattttctttaggtatttaagtatagcatttcaaatatagtattttctttaaatatagtatttcaagaaatatatagtatttcaaccaaaaggctaatcatcagaggtgcactgtagttactcttattcatcctctgaatatattaatggattagaatgtgacttgaataattttccattgcatatttaattgtgtagaagcaacaatgggggaagtcaaactgtatcccactttgttagaaggcagaataaaatcctaggacccactaggttctcataactttcctgtgcttagagtgaggcatgtaactcatgatttggataatgagtggtaatcatgagctaaatgtataaatcataaaccttttgtgccacaaaggatttatcttgccaacattttgcaaattataatttcagagacttatgcaaaaaagtgtgaaatagttttgattgtattcagcaaatctgtcagaaattatacatctttcatagcaggcctcttcatattttaagtataattgtgaggtatacatagtatcataagaatgcaaaatacttgtttttgggtgatttgagcaactactaatggctatgaaaattgctatttgctgccacctgcaagtcacatttcataatgttctagttaattcagataaaaatgccacatttttgtttgttttgtttgtttttccttctcctaacctttctcacttgttggcaatttattctatttacaggaatctgtgatagtccattgcttcctatggcttggagtattagataatgtttaggagttttcaagatgaaacttctatagcagtctttatttttttggctttaaagtaggaatttaactaagattgttttcagcctgctttcatttgcttgtgtgcaactgaaataatgtgtttgccttgtcccaattttgtcagtgtttctggactaggacctatgtatgtaagaaaagtaaaatgaaataaaaaattggggggccaaatctgtagctgagaatttaactgtttccttgagttccaaatgtgacgttgggagcagataagcttattttatgaaactctgtgtaactgagctgtactttaataacagagtagacctggttaattcaagcaagttttatgttcctttacgacccattcaggcattatttttaggaagttggttgtaatttatatttaaaagattatttttcatactcaactttatatttttctgtcattttagtgagaaactcactagttcaatcaagctttcataaaacgtagactagtactagaaaagaactttggtgaatgtgagttctttgtgcttgccactgaaaccaaatcatttctaaactcgtctaggctattttgtagtagtttttaaaaatgtgcgaatgtttgcttcttggcaattgctgttttaaataatcacataaaataacattttatgttgattaacataacatctgttgattaatattactgttaataggcctccataatttaaagaattacccttgtagtcataataaataacttgatggcatataatttatggaatttaaaagtattaatactgtattaattacctttatgtccttccttatattttgccaatatgtattaagttgtataactcaaatacaatattcattgcatcagtttttataccatttaaagatatgaaattcacaatccccttttttatctgcatttgaatatatagtaaagtttataaagaatatttgtctagagacttaattttctgtagaatgaattaataaacttgtatgtatttatggagggctctcaaccctatggatggcagtgaaaaaatcaaagaccttgcttttatggagcttacattttagctccatggtgaaacaaatatataatatgttgggtggtgataactactttgaacaaagcatagtgttaagaaggtatagagagacaaagggacttctcttttgtgtatttctttatttattattatactttaagttttagggtacatgtgcacaatgtgcaggttagttacatatgtatacatgtgccatgctggtgcgctgcacccactaacttgtcatctagcattaggtatatctcccaatgctatccctccccccttccccccaccccacaacagtccccagagtgtgatgttccccttcctgtgtccacgtgttctcattgttcaattcccacctatgagtgagaatatgcggtgtttggttttttgttcttgcgatagtttactgagaatgatgatttccaatttcatccatgtccctacaaaggacatgaactcatcattttttatggctgcatagtattccctggtgtatatgtgccacattttcttaatccagtctatcattgttggacatttgggttggttccaagtctttgctattgtgaataatgccgcagtaaacatatgtgtgcatctgtctttatagcagcatgatttatagtcctctgggtatatacccagtaatgggatggctgggtcaaatggtatttctagttctagatccctgaggaatcaccacactgacttccacaacggttgaactagtttacagtcccaccaacagtgtaaaagtgtccctatttctcgacatcctctccagcacctgttgtttcctgactttttaatgattgccattctaactggtgtgagatggtatctcattgtggttttgatttgcatttctctgatggccagtgatggtgagcattttttcatgtgttttttggctgcataaatgtcttcttttgagaagtgtctgttcatgtccttcacccactttttgatggggttgtttgtttttttcttgtaaatttgtttgagttcattgtagattctggatattagccctttgtcagatgagcaggttgcgaaaattttctcccattttgtaggttgcctgttcactctgatggtagtttcttttgctgtgcagaagctctttagtttaattagttcccatttgtcaattttggcttttgttgccattgcttttggtgttttagacatgaagtccttgcccatgcctatgtcctgaatggtaatgtctaggttttcttctagggtttttatggttttaggtctaacgtttaagtctttaatccattttgaattgatttttgtgtaaggtgtaaggaagggatccagtttcagctttctacatatggctagccagttttcccagcaccatttattaaatagggaatcctttccccattgcttgtttttcttaggtttgtcaaagatcagatagttgtagatatgtggcgttatttgtgaggcctctgttctgttccattgatctgtatctctgtgttggtaccagtaccatgctgttttggctactgtagccttgtagtatagtttgaagtcaggtagcgtgatgcccccagctttgttcttttggcttaggattgacttggcgatgctggctcttttttggttccatatgaactttaaagtagttttttccaattctgtgaagaaagtcattgatagcttgatggggatggcattgaatccgtaaattaccttgggcagtgtggccattttcacgatattgattcttcctacccatgagcatggaatgttcttccatttgtttgtatcctcttttatttccttgagcactggtttgtagttctccttgaagaggtccttcacatcccttgtaagttggattcctaggtattttattctctttgaagcaattgtgaatgggagttcactcatgatttggctctctgtttgtctgttgttggtgtataagaatgcttgtgatttttgtacattgattttgtatcctgagactttgctgaagttgcttatcagcttaaggagattttgggctgagacaatggggttttctagatatacaatcatgtcgtctgcaaacagggacaatttgacttcctcttttcctaattgaataccctttatttccttctcctgcctgatcgccctggccagaacttccaacactctgttgaataggagtggtgagagagggcatccctgtcttgtgctggttttcaaagggaatgcttccagtttttgcccattcagtataatgttggctgtgggtttgtcatagatagctcttattattttgaaatacgtcccatcaatacctaatttattgagagtttttagcatgaagcgttgttgaattttgtcaaaggccttttctgcatctattgagataatcatgtggtttttgtctttggttctgtttatatactggattacatttattgatttgcgtatattaaaccagccttgcatcccagggatgaagcccacttgatcatggtggataagctttttgatatgctgctggattcggtttgccagtattttattgaggatttttgcatcaatgttcatcaaggatattggtctaaaattctcttttttggttgtgtctctgccaggctttggtatcaggatgatgctggcctcataaaatgagttagggaggattccctcattttctattgattggaatagtttcagaaggaatggtatcagttcctccttgtacctctgatagaatttggctgtgaatccatctggtcatgggcttttttttgttggtaggctattaattactgcctcaatttcagcactttttattggtctattcagggattcaacttcttcctggtttagtcttgggagggtgtatgtgtccaggaatttatccatttcttctagattttctagtttatttgcgtagaggtgtttgtagtattctctgatggtagtttgtatttctgtgggatcggtggtgatatcccctttatcattttttattgcgtctatttgattcttctctctttttttctttattagtcttgctagcggtctatcaattttgctgatcctttcaaaaaaccacctcctggattcattaattttttgaagggttttttgtgtctctatttccttcagttttgctctgatcttagttatttcttgccttctgctagcttttgaatgtgtttgttcttgcttctctagttcttttaattttgatgttagggtgtcaattttagatctttcctgctttctcttgtgggcatttagtgctataaatttccatctacacactgctttgaatgtgtcccagagattctggtatattgtgtctttgttcttgttggtttcaaagaacatctttatttctgtcttcatttcgttatgtacccagaagtcatccaggagcaggttgttcagtttccatgtagttgaccggttttgagtgagattcttaatcctgagttctagtttgattgcactgtggtctgagagacagtttgttataatttctgttcttttacatttgctgaggagagctttacttccaagtttgtggtcagttttggaataggtgtggtgtggtgctgaaaaaaatgtatattctgttgatttggagtggagagttctgtagatgtctattaggtccacttggtgcagagctgagttcaattcctgggtatccttgttgactttctgtctcgttgatctgtctaatgttgacagtggggtgttaaagtctcccattattaatgtgtgggagtctaagtctctttttaggtcactcacgacttgctttgtgaatctaggtgctcctgtattaggtgcatatatatttaggatagttagctcttcttgttgaattgatccctttaccattatgtgatggccttctttgtctcttctgatctttgttggtttaaagtctgttttatcagagactaggattgcaacccctgccttttttttgttttccatttgcttggtagatcttcctccatccttttattttgagcctatgtgtgtctctgcacgtgagatgggtttcctgaatacagcacactgatgggtcttgactctgtatccaatttgccagtctgtgtcttttaattggagcatttagtccatttacatttaaagttaatattgttatgtgtgaatttgatcctgtcattatgatgttagctggttattttgctcgttagttgatgcagtttcttcctagtctcaatggtctttacattttggcatgattttgcagtggctggtaccggttgttcctttccatgtttagcacttccttcaggagctcttttagggcaggcctggtggtgacaaaatctctcagcatttgcttgtctgtaaagtattttatttctccttcacttatgaagcttagtttggccggatatgaaattctgggttgaaaattcttttctttaagaatgttgtatattggcccccactctcttctggcttgtagagtttctgccgagagatccgctgttagtctgatgggcttccctttgagggtaccccaacctttctctctggctgcccttaacattttttccttcatttcaactttggtgaatctgacaattatgtgtcttggagttgctcttctcgaggagtatctttgtggcattctctgtatttcctgaatctgaatgttggcctgccttgctagattggggaagttctcctggataatattctacagagtgttttccaacttggttccattctccccatcactttcaggtacaccaatcagatgtagatttggtcttttcacatagtcccatatttcttggaggctttgctcgtttctttttattcttttttctctaaacttccttctcactccatttcattcatttcatcttccatcattgatagcctttcatccagttgatcgcatcggctcctgaggcttctgcattcttcacgtagttctcgagccttggctttcagctccgtcagcttctttaagcacttctctgtattggttattctagttatacattcttctaaatttttttcaaagttttcaacttctttgcctttggtttgaatgtcctcccgtagctcggagtaatttgattgtctgaagccttcttctctcagctcgccagagtcattctccgtccagctttgttccgttgctggtgaggaactgcattcctttggaggaggagaggcgctctgctttttagagtttccagtttctctgctctgttttttccccatctttgtggttttatctacttttggtctttgatgatggtgatgtacagatcggtttttggtgtggatgtcctttctgtttgttagttttccttctaacagacaggaccctcagctgcaggtctgttggagtacccggccgtgtgaggtgtcagtctgcccctgctggggggtgcctcccatttaggctgctcgggggtcaggggtcagggacccacttgaggaggcagtctgcccattctcagatctccagctgcgtgctgggagaaccactgatctcttcaaagctgtcagacagggacatttaagtctgcagaggttactgctgtctttttgtttgtctgtgccctgcccccagaggtggagcctacagaggcaggcaggcctccttgagctgtggtgggctccacccagttggagcttcccagctgctttgtttacctaagcaagcctgggcaatggcgggcgcccctcccccagcctccctgccaccttgcagtttgatctcagactgctgtgctagcaatcagcgagactccgtgggcgtaggaccctccgagccaggtgcgggctataatctcctggtgcaccgttttttaagcctgtcggaaaagcacagtatttgggtgggagtgacccgattttccaggtgacccgtttctttgactaggaaagggaactccctgaccccttgtgcttcccgagtgaggcaatgcctcgccctgcttcggctcgcgcatggtgcgcacacccactgacctgcgcccactgtctggcactccctagtgagatgaacctggtacctcagatggaaatgcagaaatcacccgtcttctgtgtcgctcaggctgggagctgtagaccagagctgttcgtatttggccatcttggctcctcccccttctcttttgttatgagtggtcagggatgtcctctccggggtggtggtatttgagcagacatatggataaagtatggaagtgacacacaactttattgagaaagaccatctcaggcaaatataaagtctctgaagaggaagatgtgtgtgtatgtgtgtgtgtgtgagtataaataatgtgtatatgtatgtatattttaataaccacatagactaaaactatccaactgaaacaacttaggtatactttgagaaatataaaatgaaattgtaaggtagaggtagcattaataaactatctagtataccattaaataagtttgtggtgattggtgattcaacacccgaatcatctaggtaaatcctgaaaaactcatattttattaattgcttctccttccccttctttccccgtccccactcctttctcgtctctttccccccctctccttttctcccatctttcacttctaatttcagtgaaattggagcgatttgaaattccaatcaaggttcgattaagcccagagccatggacccctgaaactggtttggtaactgatgctttcaaactgaaaaggaaggagctgaggaaccattacctcaaagacattgaacgaatgtatgggggcaaataaaatgttgttgtcttattgacagttgtgcaggaggtagcctggtggttttcaacctctagaattttaagcctttgttgaactgttagaatgtaaggtatatcattctaaagatagagtaaaaagaaaacaaaaccaaaagttattaaaattgttgtccggtttactttaacttagttttgcatagttctagtgcagctgaaattgaaaagttatttccctttagctgtgttattatagagcagaaattctgtttttaaaaattagcctaagatatacttgtttttgtaaagaaaaatatttaatgttgaacaaaataaattggagttggagtagaatgtagtttgaggaaatttgcagcttccaatgcctcttgtcttcctatttcagaagtttaaatattaagcatgacagaaaatatgtattaacactactcaaagcaaaagtgctgcagggctttaaaattctcttccaaccatttatcttgaaggaaaaattcaatagtaatataatacacaaaatcaaataataccttagaaggtattaagattataattgttgcataggttagatatagagtcattgtaatgttgtgaataattacagtgcctaaaataagaatagaacaacatatacaacaccaaaaaatatctagtaatatatttaaagggaaattgagctgctttttttgaaactttgagatctaaaaataactgtaattatttgaatgactaagaggaaagtacattttttgaaatgctgaaaattgcctttctgtgtttattcaaactgaaaagctgagaccaagagcaaggaaggtaaaaagttaacaggcaaacattttctcttagaaaaggtgataaaatcataagtatttggaattagaacccttgcacagcactgaacctgggaaagagatttaaactctgaatttatctttgataacagggattgattttaaaatgtacatgtattaaattacatttgtaatttaaggtctgtttgctgttgctgattttattcttgatcagtagtttgcatttcagaaagcctttcattttgctttaattttagcaaagcgggttataatgaatgacttccccaatatcttgcttgaacttacaggtgattaacttggatgagttttgggaagttaaagggaagaaaacactgttatcattttttcctgtttgggaagagcttagaaactggaaatactagatttgggagaagggcagagttacttgataagggactgatgtttgtgcagtaacttgggagtgtggtttctttttgaatctttaattaaaacctgggattatatatccctgataaatattcacacttgaaccatagttactgtaaaatgcaaaaaatcttaatactgttattctttgcactttttcttaatcattttttatatatatgcatatatatatgtgtgtgtgtgtgttgcttatgttgttttgtacagatgtgggccaccattgcaacaaaatacattctttttgctctaaaatatttatgaagaaaatacttaaatgttatgtatatggtggtaataagggaaaaatcaagtattataaacaagaatgaaggtttttgtaaagatttctgttcagcgttttgcaaggtaaaattttaggcaagttttccctgaagttatgtgtatgtgagtattctcattcttcccaacttgcctttgaagagtgaaataccattattatcaagtagactactgttcagcttttattcctgccctgctgtttatcccttaagaatgagtttcttagacttttccaatatgtgattttttttcccatttagaatggtgattttaaatgtgtgagtgcatgtactatcttatctcagatatttgcacccccaatctgcccccaactcccaaaagctagaacactgccaactgatctgttataggtcctttagaaacacataattaacacttaaggttgggtgctgctaattctttgcaaaaatccaaatattgttaagggaccagggagatgccactaccccttgattttccatctaaaaatatacatgtttatgtaaacaaatctttccatatccatagtgacttttcaagtatttaagcctaaagattttgatctcacatttttatacctgtttaaattgctcacagttattacatacacatcagccatcaactaaagttgtactttaaaaatttactacaatatgtacatttctaagtcaaacacttgtgacttttgctttaattccatgaatgttcctgcctccttgatatttgtatttattctttttttctctagagtagaggtataattgtgtgatatttcagaaatacagataaatgattcaaaaagtcacagttaaggagaatcatgtttctttgatcatgaataactgattagtaagtcttgcctatattttcctgatagcatatgacaaatgtttctaaggtaacaagatgagaacagataaagattgtgtggtgttttggatttggagagaaatattttaatttttaaatgcagttacaaattataatgtattcatatttgtactttctgttaaaatgcatgattgcagaattgtttagattttgtgtttattcttgatgaaaagctttgtttgttcttgtttttaagtttgcactcaaatcttaagaaataaatccacccatgttatcaagccaatttgtacttcattatgcattgagataaaatctccaagtttgaagattattaaccaaacttttaaacacatatttttaaagtactcatctccaggtttatggaattgcattaagcagttaaaccggcttgtatagtcccatccattagttcagagtatttgaatcccaaactgttactttggtccagtcaatagagtaaaacccctttgtaacactgatactttgggacaaaacatggattatcagtgggcgctaccaaattataactgctacttttaggctaattaatattttagagagaaattaatttgagttatatgagggtgtgtataaaatggcattaagagctctatttcctggctttgccactgtagttgtgtaaccttcagcaaattaattaacattttggagctgcatttcttcatctggaaaaattgggttgatggataataggatctgcctaataggattgttgtgagagttaaaatgtaaagtgtttagaacaatagcttatgttagctattattatcataattattattgtacctagacactattcatcagtcaggttgtttaaagtattgactagcatactcagggccttaaagaactgactgcccctgaagattttgtgaaaaaagttctagatctagaggtcaggagacctgggcttattgacactagctttgtaaccatgggccaatctcataaccttagccttagccttagtttcttcttcccattaaaaaacaaacaaacaaacaaacaaaaattcaaaaatgatgccttttgcaaaaagggaaagacaaatgacaaaagaaatagggaacatgatagtccttatggtccatcatgtctagctttagtattgtgatattactgttccaagctctattttcttaaatgatgccctaggttctgagtttcctatagggctatgaggctatggatcacaagaagttgaggattctactaggtataaggagtctgtgactcttttttttttttttttttaatgtatttttgtcttgagatagagtctcactctgtcacccaggctggagtacagtggctccatcatggctcactgcagccttgaactcctgggctcaagcgatcctctttctcactttagccgcccaagtagctgggactacaagcacgctccagcgtgcccagctaattatttttttttttttagagatggggtcttgctatgttgcccaggctggtcttgaactcctggcatcaagcaatcctcccacctcagccacccaaagcgctgggattacagatgtgagccacagtgcctgacccttaatgtttttttaaattttaatcagggttttgcacacataatgtaaaggagtgcttccaaacttctttttattgtgatccacaatgctgtgcacacatattttatgaaaatattttgtgaaaaaacaatactaatgagatgcacactggttttctattctatttcatttatttaaatgttggctcttactcactaaattgatttaattaccctgtaaaatagtgctgttcaatagaactttctgtgaagttgaaaatattcagtatctgcactatccactgtagtagctgccagccacatgtggctgtggatgatttaaaatgtggttattgttggccaggcccggtggctcacacctacaatcccagtactttggaaggccaagatgggaggatcgcttgaggccaagagtttgagacaagcctggttaacgtagtgggaccccagctctaaaaaaaaataaaaataaaataacaaaaatttaagagatctttaaaaaattaaatgtcgttagtatgaggaactggatttttatttttatgtccatattgggcagcatcactccagagagattgtaagtcatggtttgaaaagcacaggtttaaaggctgctattctacaaagtctctgaaaaacagctatccactgccttcatcctccccatttcctctgcctcagaggcaaccacttttaactcttaattgattgttttggtgtttaccatcttgtatctaaataacatgcttgtatccctgcttcttgattttatcaacttttcagtgtacacagggacacctctcatcctctcaatataaatgcatagttagatcaataagtctttacattataataactgctattcagagctgaaatgtagtgggaaaacaagtgattcattttcttctgcacttttaaaccactggagctaataattgtgtttctttcacttgcttggttttctatgtacttaccgctaattctaccgcaggctctccaactaattgcttaaatctctgtagacttccagataagaagaattctaacaatttcatctggaagaaatctctcctagaaccagacgatttgccctcctttccctggtgcagggtcattatcttggcatctaccttcaccgtcatcctgagacttaactttacctttgtcgtgttggatctcttgttttctgtattccacgtctttttctcacttggattgttacttctccttgatagaatatattctacagtagcttactgagaagggataaatgggaaataattggagaccttaattgataatttgttgggtataggattgaaaatttcctctccatgttgaaagcattattccattgtcaataagctttccgtcttctctctccaacaggaactttccattctagtttcttttttttttttttttggcctttagaccaatttattttatatccttttaaaatatcatccaacaaaaagcaatgaagtttacatctagggcagatacacgtaactcaaggcacttgtagtccatcatgcccattgaataacaactttgctgttgaaacttcttaaaacttaccaagttaaaaagctgagtgatgcagaaggagtagtattttagtgtaatctgtaaattggcttttctaagaaaggaaatacatcctgtttccctagatgggtaaataagcaagagctacatgcagcagtgtcagtagtaagacatttctcaagtcttttcaaatgaatcaaaggtgggtatgggataggagagaaaactgatagaaaaacattgacaccataacaatatatttagataatttaacatttgaaaaggcaagaggtggcatttcagcagcaaagtgcttaatgaagagtacattgtggagagtcatacaagaaagtatctcatgccagtcagaatggcgattattaaaaagtcaggaaacaacagatgctggcaaggctgtggagaaataggaacacttttacactgttggtgggagtgtaaattagttcaaccattgtggaagacagtgtggtgattcctcaaggatctagaaccagaaataccatttgacccagcaatcccattactgggtatatacccaaaggattataagtcattctactataatgacacatgcacacatatgtttattgcagcactatttacaatagaaaagacttggaaccaacccaaatgtccatcaatgatagactggataaagaaaatgtggcacatatacaccatggaatactatgcagccataaaaaagaatgagttcatgtcctttgcagggacatagatgtagctggaagccatcattctcagcaaactaacacaggaaaagaaaaccaaacactgcatgttctcactcaagtggtagttgaacagtgagaacacatggacacagaggggaacatcacacactggggcatgtcgaggggtgaggggcacagggagggagagcattaggacaaatacctaatgcatgtggggcataaaacctagatggcgggttgataggtgcagcaaaccaccatggcacatgtatacctacgtgacaaacctgcatgttctgcacatgtatcccagaacttaataaaaacaaaaaaaggggctgggcatggtggctcacgcctgtaatcccagcactgtgggaggccgaggtgggcaggtcacgaggtcaggagattgagaccatcctggctaacatggtgaaaccctgcctctattaaaaatacaaaaaattagccgggcgtggtggcatgcgcctgtagtcccagctactcggaaggctgaggcagaagaattgcttgaacccaggaggcggaggttgcagtgagccgagattgcaccactgcactgtagcctgggcgacagagcaagattctgtaaaaaaaaaaaagacggcacataaatggttcagcagcgggataggtaaaggcctcaaaggaaaaattatgtcctcggtgtcattgttctgggaggaataacacattctgaatctttaactgtctggaataaatttagttcccttgtatttacatatttgaagacaatgagtgaagcaatatttccacaatagcagtaattaggaaatgtatagccttcgtgtaacagaggtgtatatagcacctctgtagatgtgctcagcagaagagttttaagttgttgatataacaaattcattgtgatctttactccagtatgttctccagtatgttaaactcatctctcccagtggttcttcaccctggctgcacttaggaatcacatgggaaggttaaaaacaacaacaaaacagaaaaacaatttccatacctcatcctccctcactggccaatggaggccatcctgctagatatttcaattcctttattagcatttatctttaggattaaataacaaaataattcacagaggagtggacagtcttcacggttaaccaaggaaggaggctcctagttaactgttggctcttctaactcttccttcttggtaggatcaatttttctttcactttggcaggtgtattagtctgttttcatactgctataaagagctacctgagactgggtaatttataaaggaaagagatttaatcgactcacagttcagcatggctgggggagcctcaggaaacttaaaatcatatcagaaggtgaaggggaagcaaggcaccttctccacaaggcagtaggaaggagaagtgccgagcaaagggggaaaagccccttataaaaccatcagatcttgtgagaattcactcattatcatgagaacagcttgggggaaactgcccccatgattcaattacctccacctggtctctcccttgatatatgaggattatggggattacaattcaagatgagatttgggtggggacacaaagcctaaccatatcagcaagttagctagctatttcctttatcactaaaaagaatgagagattctgagaggatgagatatagaatcagaacatttcttggaagacactcctaagggtatcacaaattaaaaatgggctctagtggtggtggagggacacttgggagtgctaaacaccaagtttcccatttcatatttttgccttgaggttataataaatcaatcaaacaaaaacaaagggaaaaaggaaaagagagagtatgctgaaattcacccacgcatgtgtctctccagagtgacttttgcagtagaaatctgaaaataattattttgaggttcaggtatttatttttgcacctggctatttgctagcctatgaagttataagaagcttcaaattagatatacatatacgtacatataaattacagacatgtcgacatatactttcttctttatggccaactgctcttcttacatatggctttctcaccttagctgtatcttcgacattccttaccatagggcactccatgccccacattcagtttcggatgttgaatagcatgtatcaacataggaaagtggcaatgtggctctccaggagtaggtgagggacaaggccagagagaaaaatcaagaagccctcctgcctagatactgactgagggaggaatatagaaaaacgagctgaaatcgctcaagtgtgctccccagccttcctctaggtggcatcatttctcacccagatctacattttattacccatcaagattcatggtggtgacaggattaacctttctcagggagtccaagtgaaggaaaggatatggaatcttctgttacatttcagcaggagtctttgttttctctgcaagaggcccccctgggctctctttgcttgtgaactcttcctttttgcttatggtataaacaatagctctctggatcccatctcctcgggttgtgggctatcttggttagcctttggttttgctcagaagaaggcaaactccaaaaccaactggcctggagctgcagggactcagcatcctgtttccaggagtaagattgtacaaatatgttagcttgagctgttgacttcattctctctcttaaaactttaggagtttctcttttacaagttttaaagacagactgagcactggacttttcttaggtagcaaagccatttttgttttaaaaccctgtgaagttccaatactcttagatttcctttgtcttaaaacatggcacttaaatgcttctggcccttcttgtgtagtattgctaggtgttatgaagatacaaaaaagttcttgtgctattagcacatgatgtcagaccatgagggtgaatgagaagctgaactgtgagctgaagattctacatatgtaggaatctggaaaagacaaagagtctttcaggattcagttgcctgagaaggcctccagtctgagcctactactgaagaggtgagagtgacttttaccaaattccagataataacaaggagcatgcattcattcaaagcagcatcctctctgcccactgcaccatgaaattcctgttgctttcaccccatgtagtccttgaaggccctatcggtcctcatggactacatggggtgaaagcaacaggaatttcacgggttatagcttgaggttctataccagagatctccaagagattcctcatgcacctaagatattgatgccttctgcctttggggtggccagagctccctggcaggttgcttttttatccatttatcccagggagccaatatatgttatctatgtgtgctatgtggtaaaaactgttagaaagcaccatttcagatgtatccctcttcttggagagctttggtagcacatggtctcaatgatttgttttcctgtttgtagtccaagttacacaggctctgtcaaagtagaaactgtgtctgtctcatatgctgttatagatctagtgcctgccactgtgcctagcacatagtacatgctcagaaaatatttcatgaatgaatgaatgaggaagtctaggccttgaaggatgagtaaaatttggataacctggaagggttaagggtttgcaagggtgatgagcaataggaatagagtcaaatatgtttgtggtgtatgccaggcacaatttggaggcaatgagaaattatcagatcccatcatgcctatttaacataatgctgagtgaataaagagccactgaagcatcattgctgacaagcaaagtagaaattagaacaaacaggtggtaatcgacacaaccatgtttctcttagcatctaatttcaagtcaaactctgtgtgtccactatggaaacaatgtctcacgtggtcaggggactaattccaataattcctaaatgttcccataccatcttgtagcttagaagccctcgctgcaatccctggtaccccagaggcaaaggaacactatgctgtcatccttcacaatgtgggattagaggagtaaaccctgttgttacaggcattgttttccacatggagaaatgatcctagtgactatttcatactcaaaacttatgtcaggtgtcacatccttagggaaatgtgccctgagctctctgaggttgagtcaaatgctcctctctggttcccactgcaccatacgtttaatgttaatgaaacaaccacagccaacattattgagcatttcacatgttccaggcattatgttcagtactttacataagttatcttattcaatccttgccacaaaatcctatggtaagcgcatggttattatctccattttacaatcgaggaaactggagcaaagataaaatgggtgcagcaaatcaacatggcacatgtatacctatgtaacaaacctgcacattgtgcacatgtaccccagaacttaaagtatatataaaaacctaaaaataaataaataaagacatatgaattaaaagaaaagaaaaacattctgaatgaggagaaatgaaaactccagtcctccaccagatggtgctgtgggagtccaaaagaaaagtgccctcggacctcttcctttcccactcctttcccaagaatactccaaatatccgcatttttgtttctttgtttttcttttttcttttccagagaagcctgagtgggtgggagaaacattttcaagataatgtttaggcaggaattgacatgagtttgataattttatttatgactttatgttttggcccaaaaggcaagattgaccttatttcactccacccttttagattcatgtacttatttcaaagatctcaaagtggtttttgcacccttgtcaccattacaaagctggaaataaaatctgaattgcccaaagcattggaggaggccgtgcagtggagtgaaaacgtctcctgactgcgaggcagtctgatggctctgccattaactaatgagagacttcaggcaagtcccttctcctctctggacctcagtagctccgcctttacaataagagggttagatgagacttccaaccctgaaatgttttattttccctgatagtttctatacaaaggacagtagacaataaaaaagataactgacctctggttcaaatctcagcttgaccacctatgagccaatcgaatttggacaagttacttaacctctctgcaacttaatttcctcatctgtataataggaatactgttttacctacctcagagggttgttgttaaggattaggtgagataatgtatgtaaagtgtttaacacagtgtttgtcactttcagtaaaagctattatcacatagagcttaccctcacaatgtagcaatttcctagagcttgggtgttcatttagtagtcatcaaaattgggggaagttttaagtactaagccacaaacagtcaggcttggcccttttataagtataatgataaatgcatttcatgggtgcactgcaaggctaagtatgcaattgaagcagagagctgcacaagtaaccataaacaatgggaatcctctcacactgttggtgggagtctaaaatgatacaagccactttgggaaaatgtctggcaatttcttataaaactaaagtacatctttcccatgacccagcatttccacacctaggtatttacccaagaaaaaggaaaacatatgtccacaaaaggaattatatgagaacatttagagcagctttatttttaatagccagaagttggaaacagaccaagtgttcatcagtaggagaatggataaacaaactgtggtatggtcacacagtggagtaccactcagtaataaaaaggaacaaactactgatactcgcaacagcatgtgtcatgatttatgtatcatatatgtgaattatgtatcattatgtatcatgtattagcatgagcctcaaaaacattaagctgagtaaagtaagtcttattcaaaaaagtccatgccttatgattccatatatatgagcttctataacaggcaaaactaatcaatgacggaaaaaaaacagtggctgcctctgggagtgaagggagaggattgcctatgaaaggatgagaggacatgttcttgagtagtagtctttatcttagtaggggttacatttaccaaaactcagaaaatatgcagttaatatttatatatctcattgtatgtatattttacttcaaaaggaaaaaagaataataaacaaatattggactatagttaatgataggtatggagaaagtgcttaggagtgaagtgcatactgatgtatgcaacttcaaaaaaaaaaaagataatgaatagacaaatagatagagggaggagtggataggtgagggatgaataaagccagtataggaaaatattagtggtagaatctaggtggttactagatatcctctgtaaaattctgtcaatgtcgctatatgtttgaaattttacacaatatatacttttttttggaaaaatgtaacttcaaagtttcacagtccccacagagtgaatctttttcaaagttggtaagtttcattacgggaaggcagacctcagacctaggtaaaaatttcctgagcacatattatgtgccaggcactgtgccaggcatggtgaggggtacaaagaggaagaacacagcacctgccctcatgaggtctgtaggggccatctgatgagcccatccgtcactattattctacgctatgagattgctaaggacagtgagatttcatctagttgagaaggtgtgtggcattgaagacattttgggtaattagtgctgtaagtagggttggacagcatcttcaggccggagcacagagagtcttgaaggccacagtaaggtgatcatttggaagtctagtggacccattcaagaattttgagccaaggagtgacatctttaggaatttactgggagaaaggggcaggtgtgatagatgccattgctttacgggggttggcaggcaagggagcttttcaggtacctgcaatgagcaacgggagcagctggaagcatccataaagagaggttcagaatgaccaggacagccccaaagcctaaggagatgagatcttggtttgatcccctgggaaatgggaagccatttagtctgtgcctctgtcctacttctttgcccaaggatgttgtggctctgtaaggccatactggttgttcacagtcaaaatctattctgatggtttgttagtccattctgattgaccagcattgaagatatactgctgttgaatccatacctgcccacctcataaggttgttatagggttaattagtataatgtatgtaatatgcctggcatatgctagacacttgataaatgaaatcagggaccaaatttgatgctccagtatgtggcctgaatataggaggatatcagcacaagcccacgaagatctccaagaagtctctaagtaaggcatttgaagctcctgaggcccattccaacctacaaatattgtgatctttatcaaaccccagttagtctgaaatgctgtgtatattcccatggaaaaactgagaagccccagttggattaaggaaccgtctaatttattctcatcagtcttttgagaacagacctactgtggtggcttatggcaaaccataccctcaagattgtgctgctaggaggaggtagagaagcttgcagcatagcctgggacagtgagctcagaccacctggagtcttcctttttccaaacaaggctttggactctagtgcttagagattgggcccagagtctcagttctctccaaattctggctggtcgtcctgcccactacttacccagctccacatcctggcactccctatttgtccccagttcacaaagaagttgtctgtgagagttataaaggcacagactgttcaccgatgtgacttgctcaccgatgtgtctctaggacccagcacagtgcttcacacaaagtaacatgtaataaatatttgttgaatgaatgaatgaatgaatgaatgattccttctcagtctttagttggtgcctcatgaagccttctttctttctctcctttagagcccactgtggctttgccagccttctggactccgacagtgcttaccatctgtgtctgtcctttggcaactagccaaactcaactcagttcaattcaaccaacttccatagagctgcactgttggcaggaagcactcacagtctcaaggaatggggaaagcatttcctatccatggcgcctcaattgtacttttaaaacaaacttggcatggaagagaacctttcccgagactctttgaaagtctaaatacatgattgtaaattacttccctttgtcaacacccttgattaccattttggaaatgagttccaggtgatggataaacagatgattatttgacaggtatggggctcgtggaaaatgggggtggaggggtggtgaggaatgagaaccagtgcccatctggtggatttgcagtttcattaagtgtggtagggaaaggggttagcatctcagccattccaggctggcctggaactgagatttaaaggatgcccatcagcccctagtgtgaaaagaaagccaggatcccctccaccccacacctgttgttttttttggagtgctgggcctttttaaattttatgactattctccgtttctatttccacccgcttttacacatctatccctccccatgccattcttctataaattagtaggttgacttctctctggtagtgatttctttcaataaaactagaagtagcgttgtgtttattaaaacattattttaatagcaaaacatgaaaataacagaaatattacaataaatggcaaagttaaataagttatggtagatccatagtctggagtactgtgtagacaataaaataacactaaggagtcagtatttagaaagggagacttccatgaaattgctatcatattccattttaatccactcttttgatcaatattgcaggatctggatgcattcattgtgcaatattggaaattattcttagcttataactatactgtggctggggaaaagatgttctttaaaaaataaaatttgtaagtgatctactctaaaaaaaacaaaaacaacaacaaaaaataacgctatggagaaatagtaaatgacatggaaaaatttacagtatgtttttaagggaaaaaggccatgaaacatgagagagagagagagagagagatttgagagagagagtcatgagtatgcaccattgataatttttcgttcttttctcttgtcgcttttttgtgttttccaagatttccaaaattttccttgttgcttttttgtgttttccaagatttctgcattgaatgctgcaaagtaaagctcagaagggtgcattgtgaagaatctgaaagcacaaacaggggcatagagcaaggcttctttcagtcaacgaattttgaggaaggcaaaatgcacagagtattgcagaggaactccaggaagatgctgtttttcaaattcaaaggggagaagatggtgtctattggtggtgagaacttaagttccaccacagaagactaaactctgttaaagaatcaatgagtaacaactcctgggtttctgaacatagggctgaattgatagaagtggtgttggagaattattctaaccataacatgatagattcagctgtaagccaggagattctctgtttgcatatttgacctgaggtaatgagaacatggattaagcttgtggcaataaaaccagaaaggaaggagcagagggatctgagacatgctaccaagaatcagagctagagattcaaatttggctaaatatatgccaagtggtaggtgaaaccatgtaagagacactcttcaaggaaatgggtgttgagagagaatagctgaggactgagtctttggggattccaacagttaatgggaggaggaaagaaggggagccagcaaaggaggcagagaatggtgggtcagagagataagaagagaaatttgagaatgcaatgccacaagagccaagggtaggacagttacaggaaggagtgggtggttgatggtttcaaattcatcctcgaggtcaaagatgcaaagggagcagagacccctgaatttgacccggaggtcactggtgaactgacttatagaaagtagttttggcagaaagcactggactctagaaggttcaagaggagggagaggtgggaaaatggaggtagctcatgaataccacccatttgacacaagtaatgtgtgaggactgagaagaagaaggtcaaactttataattccagtcctgctacttaaccagtctgaacctcagtttcctctttggaaaatgagaatcctattagctcataaggctgttgaaattagaaaacaagtttaaatgattatttgtatgttacagtaaaggggtttcttcctcctttcctctcaaaaaaaaaaaaaaaaaccctagctatttctaggtatatgttaacacagcagtcctcaacctttttggcaccagagactggttttgtggaagacaatttttttcatggacactggggaggggtggatagtttcaggatgaaactgtttcacttcagatcatcaggcattagattctcataaagagcatgcaattgtagatccatggcatgcgcagttcacaatacggtttgagctcttctgagactctaatgccactgctgatctgacaggaggtgtagctcaggcgataatgctcacttgccctctgctcacctctttctgtgcggctggttcctaacaggccaaggtccagcagcctgggaggttggggactcctgttttaacagataagagaagtctttttagctcaacagtcatatcactaggttagcagtgctttgaaaattctctggctgtgtcctctggcattcatcctgccaagttgctttaacaattctttcctgaggccctctgaggtgagaatattgaggcaaggtgattagaagggagccagtgtcagggtcatgtggaatgtctctgaggcctgtttagaggctgtgaagcaaggctctgtttgagaccctggatacagtttggtgccaacctcacctgaacacacagaaggctacagcccctgggtggatggtgggctgaagaacggttggggaagaggcatcggaaaaccttccttttttaacccatggcacctatagattgaatggtccctggactgaacggtcttgaacaggcagcattattttcaaggtgtgcctaaggtcatacacttttcttgctttctgctctcatttggcaactatggacaaccagacctagccagcactacctcattttttctaccccaccatctacaaaccaacccttttcctttgtgaagctcagtctgtttccaatttaacatatctggcctgatctttgtcttggtgccttgttttcccctaaaaaaagacagcctttgagaaaaaaatggctgccctaaaagccattagggcctagacctgttaccaagtctagagaggcacacagctgtttgctggcctaactgggagtagggtgagcatattctctagaactggcacttttcagatcccgagatatccacagagtgtagtcaaagggccttttaaaatgtgcatgctactcttattggaagaacttggtttcacttctgggaagatggcttacttacccatgggaaacaggctcccattatgaatagtacattcatgtgctaagatgtgttgacttttcaaaaagtgtcataggacatcagagcaggggtgcttccaagaaggtgtaatatcacttatatcaccagaaaccattttggataaccagggagttctactctgccttggccttctagcaggtgcctgagcactcagtcaccaaattcagcctgagcatcttctgaataagatgctctcctccgacaaggtgggaggggggtgaaaaggggggcggggggaaaaggaaaggaatgaggactagaaagataggcctgggtccctgtatatgggagtaacttccataaaatgtggacaaggggtctctgctgcggaaaggcgtctgccctctcccttgagcgccccaaggcagagctgccttagggggccaaatgctgtatctgggccaaagcctggcctgcagggcaggtggccagaacttggaaggaattctcttccgcagcccagggtccaggcttggccccagcaagctgccctgccagcgtctgctgcctggggcctcgcgcattccgagcccccgccccctccgcccgtctcccagcctcgcccccactcttgtccccttctcctccccccaccagctgtcccctttccctggagcagcgagacagccagagcctgggaagaggcggccgcgggccggagggggcgtggtggggaaggggaggaggggcgggagtgagggaataaggaggccccgccgtcggcgcccccagccactgcgcgctcgccggagagctgggtgctaccgctgtttccgctgctgagccctgcccgccggccggcccgctcgctagctcgcttcccctcgcccagggggaaaggtcagcagcgtcctggagccgccgtgtcactccccgaaagccatgaactgcagcgagagccagcggctgcgaacccttctgagccgcctgttgctcgagctgcaccaccggggtaatgccagcggcttgggcgctggccctcgtcccagcatgggcatgggggtcgtgcctgaccctttcgtgggccgcgaggtgaccagcgccaagggcgacgacgcctatctctacatcctgctcatcatgatcttctacgcctgcttggccggaggcctcatcctggcctacacccgctcccgtaagctcgtcgaggccaaggacgagccgtcccaggcttgcgccgagcacgaatgggccccgggaggcgccctgaccgccgacgccgaggctgccgcgggctcccaggccgagggccgccgccagcttgcctccgaggggctgcctgccctcgcccagggcgctgagcgggtctaaaaccacagccccagattgctggttcgcgccctcctcatctcgctcatccctgggcgcgcctcccaccttccacccccaactcccttccagggttcgcctcatctgaggcccagataatggtgagaggccaggagaccttgtctggaaggccctggaaggagaagcaccaccttacccattcgggccagtttctccctcttcacccctgcgcctccacccctaccccgcacatccaactgcactaaactgcctctgctctcttgtcttcagacagccctgacagcacgctccagccctctgggaactgaatccaacacgtccaacacttggcactgaactgaagcaatg

SEQ ID NO: 140 - DNA, 2027 bp, Homo sapiens
ccgaggcaggaggattgtttgaacccaagagtttcagaccagcctgggcaccacaggaagaccctgtctcaatgaaaaaaaaaaaaaaaatttagcagggcgaggtggtgtgtacctgtcatcctagctactcaggaggctgaggtgggaggatcacttgggcccaggaggtcaagcctgcagtgagccatgattgcaccactgcactccagcctggaccacagggcaagacactgtctcaaaaaaattcaacctttatatatgggaaaatttcatttaaaaatctacacttctgacttctcttaaaatatgagaactgctcccctgcaccccactggcagcagttggtcaggggtaaggagtgactgccccttaaggcagggccagcattttccagttttcctcagcctgcaggactctctgctgtctgtcgctgtgactgaaggtggtggccattccccaggatggcctgcgtgtggctttgttagaggagcagggaaaggggaaagggaagaatttcttattcccatggggaaagtgggtgtcctacagccccagtcatttcaggaagcgattagagtggggctttggggtgggggtgtggagtgagaattttaaaggctcgatatgcaaacgagtgtctcctcctggccacaccaggcacagggcccatgaggcagccgggaaacgggctctgagtcttgcgtgaaagcgtatgggacgcgcatcctcgtggctctttgggaaacgtggtgggccacaggctggtccgggtgccagaacggccatcagaccctgtccctgccttgctccagctctgttctcaaggctgctttcctggtgtgggagcagcatccgctcagaagctccaagttctggttttgtcaggtgagcctgcccatgcctgggtcagtcctggtgattctgataggcccagcccgagtcagccttcagctgtgtggtctgtggtgactggggtgtgggtacagacgccaggcgggcccgcatgcctgtataacctcgcgccctcctgggccgctgctttgttggcatgtgttgatcatgctcttgcagggtgctgagtctgtgggcctgggaagggcagctgcatgcatgatctccaagggaagggcgggagccacagcacagtgattacaaacgcagactccagatccaggctgcctgggttcaaatcctgactcgtcccagaccagctgtgtggccttgggcaagttaccgcacctccctgtgcttcagttttctcccctgtgaaatggggacagtaatgacccctagttcacaggttgttgggaggatttaacctcagcccatataagttctcctcacctgctagaaatcatcctttgtcttatgccgtggtctctacatatgaagggaattaacttctcatctagtaaatctgtgacaaatattctttccctggatggttgtctgtctttgagtttgttacggtaattttttttgccttgcagaatattatatttatgcacttaaatttattagtcttttcttatgactcctagatttttatttttcctttttttgtcttgtcaaaaaagatctttcctcattttattttttggatgttttaggattcagtgcttataacaagaaaaaattatcaaattagtttgtcaatattgtgcttgtttctttttccttcagatttttccttgttgtattgatggcccaactccatgaggcaaagttccttaaaaggctaatatggaaggcacattgtgaatttgttatgactctatgaagacgtgaattgatacttaaatataagctgttgctcaggtagaagtcattgttttgtgcgttgagttaactaaatgaaaagcttggttaccggcaccatggatggccttcgatctacccttacctaacaccacatggaatttttttatttttatttttcttcctgaacagaaagacatttggccaagacaggctcattttgaattgagtgaaagaaattttaaaatgcagcaaagtttttggaa

SEQ ID NO: 141 - DNA, 134335 bp, Homo sapiens
agttcctctcccgccgcgccgggccgcgctgccgctcgctccccggccgtggcgcctccgggccagacgcgctgcagcctccagcccgcggcaagcggggcggccgcgccacccccggccccgcgccagcagcccctcgccgcgcgtccagcgttcccggccagcagcctccccatacgcaggtcctgctgggccgccccgtcgcgccccccactctgaactcaagtcaccgtggagctccgccgccccgaaactttcaccgcgagcgggtgagtcctctgcgcgagcccaggggtgggcgcgggcacgcgggcagtgggtgcaggggccgcggctgtgccaccagccggagtcccgggcgcagggtagactcggggccgggggcatcggcgcggcccgcggcggcttcctggccgcaccgcctctgggctccggcggcgaaggctcttagatgtcttcagccgacgggtgaccgggcccgggggagccagggcgcggggactgaggctccgcaggtgtccgccgcggagccgcgcaggggagcggtgggaggtgcgggcgcgggggcgggctcaccgcgtgtccttcccggtgagggcccgagggccggctgctgtccctgctccggccgcttctcgcacacagtggggaagccgctgcccttgcggagcgggcgcgcggcggggatactggagaggactcctcggattgtgcaatctgatctcccctctggaccctgggtctcctggcagtgggagatggggctcggccggcgccctctcgaggcccgcggacagttgccctccctggtggccccgggcaggagcgtgacgtcgaggggctgcagcggaggctggaactcaccctcccgctgcggcgcctctcggcctgccgaggagcagtccggtgcttttgccggctgagaggaagcgagagttattttaagaattcaggggttgcctttccttcgccttgggggaagggcgtaagagtcagttcccactttcctgcattctctgggcccatggtggcatcttttgcttgcggtgcattcgtaactttccaacagcctgcctgtcatgtggattagcggttgtgtttttgtatatccgagtgtgttaattatcccaaattcgcccttcttcgccagctcagaatctaggccttgcacttttctggctgtatatttaggggaccgattattgaaattccctgtttgagtttcttcatctttgagagagcatatatacctcaggggctgtttagtacacacaaagcccctagtacgtaccaagcatttcataaacgatgttactgttatttattgcagtgaattctattcatataaatgaggcttcttggttctttgcagcttggtgatgttgaagctaagactaccatgtcagatttagccatctgaccttattagtaaatctgcttaataaatacatgagggatttgctgtcccaaagcagggcccagtagtctgactttccctaaagaactagccaataaactggtgggctacagggatgttttctctgtacagccaacacctaaagccatgccctggggaataggcactgcaagaacccaggccttactaagcccttctctgtaagagtaagctttgttgggaaagggtgggatccagttagtccctccattctcatttggaggtaagcaggtaagcgctttgaggcctgaataaatttcactggatcatagagtctttggtgactgggcctctttggatgtaaatgtgtggcccttttgctgagtgaaggatagagggcagcagatgtaaggggagagaaagtaggagccaggaaccttgagttttggcctcttccatcatttaatatgctgtgatttgggataagccacttgggccatttattcagccaagatttcctttatagcagcagccagagttatattgatttgtctgcaggttgatagtctgtattaaccattacagtggaagctccatgaaaactgcttcatctgtcttgtccaaaatgatagccccagtgcctggtacatagtaggtgctcagttcgagattacttggaagaaggaatgaaggcctcctgtgagcttgccctatgcaaaactgaggacatagggagatgaagaaatagagctggtccctaaggtgtttgaagcctactggccctttctgttgtggtttctaaaacggggatttgagaggctttgttgactgtaaagttacccagcactgagttacccacatttagtgtgggtaactaaatgagagtctccactcagcaccgctcttctctacttattactggaagagaggtcctgatgtggggtggttaagatgtttcctgcaaaggtagttggcccaatccagaagacctacattattttagagtcattggtgttacaaaggtaggtcgaaactttgtaatcccgcccctgccctccaatagctttcttttagcagaaaagtggtccagcactgttcaatgactttgaaagccttttacttctatctgcaatatttgtttttagataaatcaccaaaaacatctgagattccagttggttcacatgactatgtggagttgtaacttaacaaaattaaatcatattattcatgtacaaacccatactaactttataaataaggacaccatgtatacatgcccacagcagggaacattgttataagctcactcctactgatgatctcagtgatgcatggatgagtgttaacattgaaaggccaccacaatcattagtcaggacattgatcaatgtcacattgatagcagagatagcctcagacctttactggctcttcctagtgatgatggtgaaggtgttagcacctttcatttgttcagggctctgaagtcttcctgaactctaatttcatttgaacctcttgtggctcctataggatggagagggacagatacagaaaaagattcagggggttgtctaaggtcacaggcttggttaagcggtaccattaggagtagtaggtatgttttttggctctttctacttgtccacctttggacttgtagtgtgtgctcaattacaaatgcctctcaacttatgatgaggctgtgtcccaataaacccaatcgtaagttgaaaatactgaaagtagaagatgcatttaatacacttaacctactaaacattatagattagcctaacctaccttaaacatggtcgaaacactcacattagcctactgttggacaaaatcatctgacacaaagcccatttgataataaagtgttgaatagctcatgtaatttattgaatactgtattaaaagtgaaaaatgaaatggttgtatgggtacttgaagtacagtttttattgaatgcctaatgcttttgcaccatcgtaaagttgaaaaatcattaagttgcagaccatctgtgcttaaaagcaaataaataggtcatttaacaaacattttaaaagtgaaatcatgagttaattttcttttatcacttggtaattgtctgaactaagtggctaactgctcaggacatagcagatgcaccatcaagctgggcacttcaagctgtcttctagaaatgaatttctgtgctttttagcactgctttttgcttgggggtgggaaagggtggtctccagtaactgctaagatgacacctatactggctgctgtccgagcagccctagtgactgtcttgggggcaatcagttgcttaatggttaatacagaagtacctgagtaatactttgcaaaaggactttccccgacctgtgctgggagtgtctccctgtaaactttgccaacctcctggttgttttatcagtgagagcatcatttaagtgaaaatataaattaaggagacagggctcataggacgcacattaaaacacctgatcattttgagcacctgctgtgtgcaaggcactgttctaggccaacagtatagatatacattgcctcccatcttttaaggctgataatgaagagaagaacatggaagaggaagttgttgggttttttttttccagtcagaaatactgaaagatttcttacagctgtctggtttcctgatacttaaattgtgaaactttaagttcactccattatcatttctaaaatttattttgaataagttccctttcgggggagatacccatgtgtagagaatggtatggaaatctgccaatggagggattagaaattttgtcagtttaaagacttggaccttttgagatttttgttgttgttgttttgtttgttcttcttttctgagatgaaggctcactctgtcgcccagcctggagtgcagtggtgcaatctcagctcacggcaatctccgcctcctgggttcaagcaatcctccctgcctcagccttctgagtagttgggattacttacaagcatgtgccaccacacccagctaatttttgtatttcctgtagaaatggggtttcatcatgttggccaggctggtcttgaactcctgaccccaagtgatctgcccgtctcgtcctcacaaaatgctgggattacaggtgtgagccactgcgcctggcctttctggggtatatttggcttaagttagttggaagggctctctttattttttattctgcctcccactgaagagacagagttcgctcttgtcacccaggctggagtgctttggcgtgatcccagttcactgcacctccatctcctggattcaagtgattctcctgcctcagcctccctagtagctgtgattacaggcgcccgccaccatgcctggctaatttttgtatttttagtagagatgggtttcaccatgttggccagggtggtcttgaactcctgaccttaggtgagcccgcctcggcctcccaaaatgctgggattacaggtgtgagccaccgtgcctggccctgtcttgtaatttagaagagcaagtttaaatacttgggatgatgtattaaaaagcctcatccatgctgacaagagcagggcctgtagtagcctttgttgtttatccccttcatcctgttctgtacttcattttctctcattactgaattagctggcagcattccttatttgccacagagctatttcttaaaagctgtacttacactcaggatacagttttccttggtatagaactcttccatggcattgctctttcactgagctttattaaccctcaggcttccagtaccccttcttctgctctccccacttcattccctatcatcttacaaaggcttcttcaaccaggaattggcatgagctgaccgtgtatgggaagagattgtcagttaacctcattattgtaaatgctcagtgttcagaatgctgctacttaaatgacatcctatagaactgcatgaatcgggatacatttaaataatccagttaagtggctgtttcttgatggttgaggctctgcttttgggttgtagaacactgggaagaagtcttcacagctcagatagttttttagttggtctcatttcctttctacagtccatgcttcaggcaaagttacatattgcctgcctgcccacacctttctgtgagcatctgaaatcttgctcactcctctttattgacaccagaccatactggttggaagcttctttccagtccccgctttcctccctccattggtaaaacatctggtggggaggtcttcgtgtggtctttgggcctacccttgggcgctggtacagtgagactggagagatgggtgtgtattcattctgcctcccactgaagcaatgacgtcttcttggtgtttgggtctctgggtgcccccactcttcctgtaaatgttaacccccacggaggtgaggggaatggagaagcttatctcagagaggctctctggagagggaggaccacttctgctttccagggggaagctgtgtcacggagagcagaactgtagcccgatgctggagagaaaaggccccagaggaggcaggcaaggaagtgatacttcctccaccccaggcccctgggtcatttgcctgcagccccaccttccttaccacccaatgctgcgttttcctcggggttctttctaccctctgctgccctctgcattttcggtttgcccttaagtgaggggtggggcggggtgggagagaggagcagtctagagtcttaagggcagagcctgctttgcgaagcccaccctggccatgcctgactttttcagcaacggaaaaatgtacattttgaaattccccgtcatggaaagtgttatgaaactcttgggtagacgtttcgaaatcttttaatgttcaggctacataataatttttaaatactaactataataattcaggactattttaaaaattgttaaattccttgttaaattcttgggatagaacagtggctgtcaaacatctttttttttttttttttgagatggagtctcgctctgtcgcccaggctgtagtacaatggtgcaatctccactcactgcaacccctcctcccaggttcaagcgattctgctgcctcagcctcccgagtagctgggattacaggcatgcaccaatgcaccaccatgcccggctaatttttgtatttttagtagagacagggtttcatcatgttggccagcctggtctcgaacacctgacctcaggtgatctgcctgcctcggcctcccaaagtgctgggattacaggcatgagccacgcgcccagcctgtcaaacttatttgaccacaacccatagcaagaaacattttaccttgtgctcaaatacacatatctgtaggcaaaacaaaatagaaaaaggaaaatacaatctggtggaacagcccctccccttaacttgcaggggaatgtggcctggagcagcttttctgaggtaggattggccagctccatcagagtttgtttgttctgatgcataatagatatacatagtttcagggcacatgtgataatttaatacatcatataatttgtaaagattaaatcagtatttgcgatagccatcaccttaaatatttgttttctttttaaatgctgaatcttttgaattcttctagctgttttgaaatgcacaatagttaatggtgaactctagtcaccctaccaggtcttatttcttctatcaaacagtatatttgtatccattaatcaacatattttcatccccccttccaacgtacagagatgggcagtccaatagggaggtttattaaacaaacacaaattaagtcacattcatataatgggatactttgtaaatatcttaaaagataaaacattcaattacagttactaatatgaaaaattttttttcaaaagctgaacacggccaggcggccaggcgcagtggcccttgcctgtaatcccagcactctgggagcatgaggcaggaggattgcttgagctcaggagctcgaaatcagcctgtgcaatttgtctcaaacaaacaaacaatagcaaaagagctgaacacaaactagtagatgacatgataccatttctgaaataaaatattcatatatggacacatcatctataaactgcatttcaaacaatttttatactaagatcttaatagtgattatttctgggtgacagttgagtgctgtttttacttctgtacgtctttatatttaaaagaatgagcatcccatatatacataaatatatatataaatcccacatataaatatatacataaatcccatataaaaatataaatatatatatatatatatacacacacacacacacacacacacacacatatatatatattttttttttcctgagacagagtcttgctctgtcacccaggctggactgtgatggtgtgatctcggctcactgcaacctccacctcccgggttcaagtgattcctgtgcttcagcctcctgagtagctggaattacaggcacacaccaccatgcccagctactttttgtatttttagtacagacagggctttgctgtgttggccaggctggtctcgaacttctggcctcaagttatccggctgcctcagcctcccgaaatccggggattacaggcataagtcattgcgcctggctccttatatgattttaaaacggcaggatataaggagcaatggaatgaagccagtgggactgcagaaggcaggtggaagcagacagggaactttggagctagagtgacttgaaggacgcttgatggatataattgtaagagtcctgtctcaggagagctgatgcgctgtaaatgttgtaaatagaacattttcttaaagaaccttccactgctatgtttagtattcagtttagcaaacttttcctgggtagctactgggagtcccgcacagtgttaggagttggggtacacacctgccatgttggtggaaatcctgaagggagtgggccacacaccctggaagaaggggctttcctgaggaaggacagcctgactatgcaggggtcattccacattaccagagcttgttccagagaggcagtgggaggctccacaggcaggcttggagggtgcttggccctaatactaaatgttggacttcatggcattaacgaaggggaatcactggagccttttagtatgaagctaatctttttgtccatcacaggcaacttcttgcctacactcttttacaatatggcatttatgacatagccaagagcgaagacacgttgaacactgacttaatgctttgagtaggtggagagttgaatgactcaaggctacttctctagagattaatttgaagctagaaagtaacatttatttctgttttctgtgacagcaataggcttcagcttgtaatcgtcatctgcaagtaggtacttgacacctcccctaagtgacctggagagtgacagatacagtaatgggcacaatccttggttttttgttttgttttgtttttgagacagagtctcactctgtcatccaggctggagtgcagtggtacgatctcactcaccagggatttggccaccacgcctggccgaatccctggttttaagcaaaattttaatatggagtttatggttgttggtataatgaaatgcggcaccatagcagttgatttttgtctttcagaaccacactggctttttgtattatttcaaatttgatagatgcccaatgtatgtaacaaaaattttccctcacgtgtatttctttctttatttatttgtatgttttgagatggggtctcactctgtcgcccaggctgaagtgcagtggtgctatctcggctcactgcaacctccacctcccaggcccaagccatcctctcacctcagtactgggtagctaggattacaggccccgccaccaggcctgcgtaatttttttgttttttgggaggccaaggcaggaggataatttgagctcaggagtttgagaccaggctgtaaccccaggcaggagtacagtggtgcagtcatagctcactgcacccttgacctcctgggctcaagccatcttcccacttcagcctccaagtagctgggactacaggtgtgtgccactatgcctggcttattttttgtagagatggggtttggccatgttggccagcctggtgtcaaactcctaagctcaagggatccacctgcctcagcctcccaaagtgctgtgctgggattacaggcgtgagccaccacacccagcccaagtatatttatcgagtgctgtatgtcatgatagtgggtggtttgggggaataccaacataaataagtgggaggtttctatcctagaggagtttattgtgctctgttctctctggattgttcacaaaccagaatgccgatcaaagactttgctagggttgtgggtgggcgacttgctcaggagatccctggcacccaaatgagtgcccagaaatcactctgaatggtcaaaagtaaggcagggcagggcggtagagcacagggtgtcgaattaatttcatgtgggggctgaaatcccaggtctgtcccttcctaactgtgggctgctgctggcaaggtgctggccttgctagcctcagagtcctcatgtttaaacctcagcagtttgttgtgagtgttctaggttacagtggattccaaactagccacaagtgaagcacatggctaaatggtagtcattggtattgttatcaaaagcaagttgcttagctgggtgaagtggctcatgcctataatcccagcactttgggagcctgagacaggtggattgcttgaagccaggagttcaaggccagcctgggcaataaagtgagaacctgcctctatagacaaaaaaaaaaaaaaaaaaaaagaataaataaaaacaaataaaaattactcagagtgcagtgatgtaatcctatagtctcaactactcaggagactgaggcaggaggattgcttgagcccaggagattgaggctgcagtgagcaatgattacaccaccacactccatcctgggtgacagagcgacagcctgtctgtaaaataataataacaataataaaaagaaagttgcttaggatggctactataaaaaatgagaaatcatgatgaaatcatgtcatgttaaaaaagaacacaacaacaaaaatcagaaaataataagtggtgccaaggatgtggagaaattggaatcctgtgctttgttggtgggagtgtaaaatgctacagctatgatggaaaatcatatggtagttcctcaaaaaattagacatagaattgccatatgatgcagcaatgctgcttctgggtatataccccaaataactgaatgtggggtctcagagatgtttgtacacttgtgttcatagtagcattattcacaatagccaagaattagaagtaactcatgttcatcaatggatgaaataaaatgtggtttatatgtacattggaattttttttttttttttttgaaacagggttttactctgtcacccgggctagagtgtggtggcaccattacagctcactatagacttgacttcctgggctcaggtgatcctcccacctcagcctcttgagtagctgagactacaggtgcatgccaccatgcctggctagttttttgtattttttgtagagataaggttttgccatgttgtccaggctaatcttgaactcctgggctcaagcaatctacctgctgtggcctcccaaagtgctgggattgcaggcatgaaccaccgtgcccagccatacaatggaatgttattcagcctttaaaaaaaggaaatgctggctgggtgcggtggctcatgcctgtaatcccagcactttgggaggccaaggtgggcggatcacctgaggtcggcagtttgacaccagcctgaccaacatggagaaaccccatctctactaaaaatacaaaattagtcgaacatggtggtgcatgcctgtaatcctggctacttgggaggctgaggcagaagaatcacttgaacccgggaggcagaggttgcagtgagtcgagatcccgcgactgcactccagccagggcaacaagagcgaaactccggctcaaaaaaaaaaaaaaggaaatgctgacacatgatacaacaaggacaaaacttgaggacatcatgctaagtgaaataagccagacacaaaaagacaaatactgtatgagtccactaatgtgaggttcctcaaatagtcaaattcatagagacagaaaatagaatggtgtcttccaggggcttgatgggggagggaatgggaagttactgcttaatgggtacagagtttcagttttgcaagatgaaaagagttctggagatggatggtgtgatggttatacaagaatatgaatgtacttaatgccactgagttatatacttaaaatagttacgatacaagttttatattgtgtttattttaccacaactttaaagaatgaaaaaaaagttgcttgatgagcagatacgtgtacaaatagacagaggtgtccttgaggatatttcattaagtttgataaattgcccttcttctggctgggtatttacctaccaagcagacgggtgttcacttttttggcagagagaggacaggatctttactcttcgtcatttaatacatggccacgtggattgctggctgacagtatattgaaatggctgtgatgtgggagagggaatgataatggagaaatttacaaaggcagagattgtggattacaaagtaaggagaaacttctaaccatcaaagctgcctgcatgggtcctggagaagggtccttctccatcattaaatgtttgtcagcaaaggctaagagattcttacaagaccttttagaaaaggttgcattaaggccagggcgcagtggcgcacacctgtaatcccagcattttagaaggccgaggcagatggatcacgaggtcaggagttcaagaccagcctggtcaacaaagtgaaaccccatctcttctaaaaatccaaaaatagccaggtgtggtggcacacacctgtagtcccagctacttgggaggctgaggcaggagaatcacttgaacctaggaggtggagtttgcattgagctgagaccacgccgttggactcctgcctgggcgacagagcaagactccatctcaaaaaaataaatacataaaaaagttgcattagatggctgtaaaaggtgcttcctgatttgatgatacagttatattaatatttctagccatgcactcattaactccaaattacataataagaaagtatctttcttttttttgaggcagggtcttgctctgtcacccaagatggagtgcagtgataccatcatagttcattgcagccttgaactcctgggctcaaatgatcctcccatctcgagatcccaaagtcctgggattacgagcatgagccattgtgccttgccaaagaaagaatatttctgacacagttctttctaacaggattcgagggaattttttaaaaagttttcccaatgcaggagtgtgtgtgtatgtgtgtgtatgtgtgtttaaaatttaagtataacacttacatagaaaagtgcagaaaacagaagaatctagctgaatgcaaagccttgtgtaaccacccccatgatcaaaaagcagaatgatgttgaccctcccccaagcagtactcccctgaaaggcatctgccattctacttctagtttttgtttagtttccagtgtaggcttctaaacaataaagtgtagggaattgaaaagcagtacaaagccatttggtttggcaaataaacagattttcaagctgtgggtttggctaccaccggcatctctctgtgtgtggaatttacttgcaattcaactggagagcaagacctcgtcctgttttaccctggcgattcagttgctaaaattctcacacatgagtttgatctgagccttatttaaatacctttttattcatccattaattagtaaaattagctggcataagctatatatagctggtttttctgcacagccaagtcaatttataaatgcaaatatgtgggtgtgataagggtggtttccactgacccacatgtaatcaaacatcctgttatatgacacagtgccagtctgtgcataggcatttgaaagtactaactgggtttgtgaattcagtgatgctgttcttcaataaaataaagactcatttttctgatgttaaggaacacagcacctttgttactgactgttatttcaacttctgtttcatgtagttttgatatttatttttgttgggggtgacagagagaggcataattgacctgtggcatttgttaatccatgaagtcatgcttcacttatgcatcattcagaaaacacttcttggatactcactactcatgaatatgcatgcatatgacttgcagtcaaagccatgagttctcaatagcaaaactgttccagatatactcagagagttaaaatgtttaaaaaacttttttttaaagaaaattttccttttatttttgttgttttgttttgtttttttttagaagcaagatctcactatgttgcccaggctagagtgcactggccattcacaggcacgattatcactcacacactatggtcctgagatcctgggctgaagtgatcctcctgcctcagcttctcgagtagctgggactagaggcatgtgccactgcacctggcttagagtataaatttttgtgtcacacaagatatgaagaacatgcacaggcactggacccatctgtgggttcatctttctgtgggacccactaagggacccatctttctgtgaaaaagtcacaagtgaagtcctggccatgcaaggaataaccataccccaagagatcatgctgagcctgtagtttgcctgtctgcatcccccaacccccccagcttatttttattttattttttactttttattattttagacagggtcttgttctgttgctgaggctggagtgcagtggcatggtcatggctcctgcagcctccacctcctgggcttaagtgatcctccctcctcagcctcctgagtagctgggactagaggtgcatgccactgtgccagattaactttcttaatttttttttttttgagacagtggtcactctgtcacccaaacttaagtgcagtggctcaatcttggctcactgcagcctcaacctcctgggctccagggatcctcccaccttagcctcccaagtagctgagactacaggcatgtgccactacacctggctaattttttttttttttttgacggagtcttgttctgttgcccaggctggagttcattggcgctatcttggctcactgcaacctctgcctcgtgggttcaagctattctccttcttcagcctcctgtgtagctattattacaggcacctgccaccatacccagctaatttttttgtatttttagtagagacggggttttgccgtgttggccaggctggtctcaaactcctgatctcaggtgatccacccgcctcagcctcccaaagttctgggattacaggcgtgagccaccatgcctggcctgcctggctaatttttgtattttttgtagagatggggttttgccatgttgcccaggctggtttcaatctcctgtgctcaagtgatccatccatgtgcttcagcctcccaaagtgctgggattacaggtgtgagccacagtgccaagcctaaaattttttgtatagttggggatctcactatgttgcccaggctggtcttgaactcctggtctcaagcgatcttcccacctgcttcagcctcccaaagtgctgggattacagacgtgaaccactgcagccagccccaaaacctccagtttatttcctccagccacagttcctgatgcttggcatctctgcgttttaactgcttgtctctgttagcaactgctggatgctacagaggatttgaacaaagagtgaatcctgagaatggagggaatattggactaaggagactgaccagagcagaacagtttccaagtgaagaagtgagtcccttagttggaaataaagtaggaagagatggggaaataacttggctggattccttactaatcttggtgaataatataggtatggattagtaacactgtagtagctaatgaaaaatattccaggttgtgaactttggggtgtctgaggagcagcatgatgtcgtagtcataaactgagagtcatgaattggtttctgggctgggtgtggtggctcacacctgtagtcacagcacttggggaggccaaggcaggaggatcacttgaggccaggaattcaagaccaggctgggcatcatagtgagacctcatctctacaattttttttttaaaggaattggcttctagtcaatgctttgtcaaataccagtcttgggacattagatgaagctccttcatctaatgtttttctaatacataaaacagtaataacagatttttgtttggtatctcatccagttgttgcaaggattaaacggggtaatgtacctgggagttccttgaagagtctaattttctacccagttttggctgttgttttggattaaactgtactaccccgagccttttcttgattttggaggatccctacccactccctactcatggtacccctggcctgttctggtagattcactcatgcatcatcaccagtcctgtggggaagtggaaatttggtgtacataccaggtgcactttcattcttctcaaaatgttatgacaaatagcaaagagaacaccttttcttttatcattagctcatccttaagcatctcgttaggggtaaagcaattaaaaaaaaaaaacaagttttagctagacgtggtggcatgcccctgtcatcctagctgctctggaggctgaagtgagtgggtcccttgagtccaggagttggaggctgcagtgagctatgattatgccactgcactccagcctgggtagcagagcaagactctcatctctgaaaaaaaaagaaaagaaaaagaaacaacaacatcaaacaaagaaacaaaagcaagtttataaataaagaaacagaatagcagggacatggatgcagctggaaaccatcattctcagcaaactaacataagaacagaaaaccaaacacggcatgttcttactcataagtgggagctgaacaatgagaacacatggacacagggaggggaacatcacacaccggggcctgtcggggggtggggggcctaagggagagatggcattaggagaaatacctaatgtagatgacgggatggtgggtacagcaaaccaccatggctcatgtatacctatgtaacaaacctgcatgttcggcacatgtatcttagaaattagagtataataaaaaaattttaaaaaaaagaaacatagaataaaaaccatacctaatttagtaagagaggcattccccccaagctcctcacgtttatttatttatttatttagagacagagcctcgctctgttaaccaggttggagtgcagtggcgtgatctcggctccccgcaacctctgccttccgggttcaagcaattctccctacctcagcctcctgagttgctgggactacaggtgcccgccatcacccccagctaatttttgtatttttagtagagacggggttttgccatgttggccaggttaatctcaaactcctgaccttaggtgatccgcctgccttggcctcccaaagtgctggaattacaggcatgagccactgcacccggcctaaacttcatttaaatgatgaggaaataactgcaatggaatgagctggttggagaacgatgttactcacccgaacgctggctttatgcagtttcaacatccacaggtatcttctgattgatcgcattacagtcttgacctaatttctcctgataaggagctgaaaatcaagcaacagtacattagaactttgattcatgtgacgcctatcatgccatataaatgaaaattcagagtttagattaagaacagtaaagctttctctgttgtaccttaaaaggtacttccctcctcctcataataataagctacatgcttctggaagttttaccaagacttgagatcaggagggagcattctgacgctgagcacacctctgactttgcacatggtggtttcgaggggttgacagcagaagatctccagagtctagtaacagttctgtcttactgttcaaatttgccttttctacctcaatttctcctccattttaacagaaaacctactactactacttcatatgtatctaaaatatttcaaaatctttagtaatgggatataagcactcttagccatcagaataacttttaaggtcaggtgcagttgctcacacctgtaatgctagcactttgggaggccgaggcaggaagatcacttgagcgcagaagtttgagaccatcctaggcaacatagtgagacctcatctctataggaaattaaaaaaattagccaagagtggtggcatgggcctgtattcccagctactcaggaggctgagttgggaggattgcttgagcctgagaggtggaggctgcagtgagtcgagatcgcgccactgtactccagcctgcgtgacagtgaggccctgtctcacaaacaacaacaacaacaacaaaaacttttaaagattagtaagcaatttttttctttggaaaaaattaaaatgaaaatagacgattttaagaaaactttttatgttttttaaatcaactttaaaattttgctatatagctctatgaattttaatacatgtgcagattcactgaattattttcataatgagaatacagaaaagttctgtgacaccctccccccaaaaaaaaactttcttgtgccacccccagcccaatgcctggcaactgctgacctgttgtctgtccccattgttttgtgttttctgtaatgtcatataaatagattcatactgtatgtgatcgttttattgtcttttataataacagctttatttttacttttaattttgttttgagacagagtctccctctgtcacccaggctggagtgcagtggcacactcttggctcactgcaacctccgccttccgtgttcaagcaatcctcccatctcagcctcccaagtagctgagaccacaggcacgtgcaaccatgcctggctaatttttgtatttttggtagagacaaagtctcaccatgttgcccaggctggtcttgaactcctggactcaagtgattcacctgccttggcctcccatagtgttgagattacaggtgtgagccacccacacccagctgaataatagttttattgagatataattcacatattgtataattcactcaaagtatacaattcagtgatttttagtatgttcacagagttgtgcaatcatcaccacaatcaattttagaacatttttattacacaaaaagaaattctgtatcctttagccctcactactctcttccccttgtcctaggcagtcactaatctatttctagctctataataaattttaggaaactggttttaatgatttcctttttttaaatagacagtttcttgctctgatgcctggagtgcagtggcacaatcacgatcactgtagcctctgatcttctgggctcacgcaatcctcctgcctcagcctcctgtgtagctgggaccacaggtgtacaccactgtgctgggctaattttttttattttttgtaaggatgaggtctccatatattgcccaaagtgttgggattacaggcatgagacactgtacccagctaagtttctttcttagttggaagagttttacaatgatgccagcacagttactacctgttttacttttgtatcaggcaataattacctttcacagaaaatatagtaagaatagcaatcctttattaaatatttgtcctctgttaggtagtcaattccttaaaaggtgtaatattgatattcttgttattgataaggaaacagatgcttggggataataaatattatgctcacttaactactaagtaaatggaacccaagtcagccggacccctaaactgatgtgtttgttttatttaactttgaaaggttattttttaaaaaatcacagttgtaatatgtggaacataatgtccttgactttagtttatcaagcagactttatacattaacataaatgtaaacgcaggaataagaccacttctgggaaatgtataataaatataatgcagagaacatttattgagtgcacacggtatgtcattcgttcttctaaacactcgtcaagattgtattcaaccaatccttataacaagtgtgtgaagttggtacagttatcatcccttttcttttcttttcttttttcttttcttttttgagatggggtcttacacagttacccaggctggagtgcaatggcacgatctcagttcactgcaacctctgcctcctgggttcaagtgattctcctgtctcagcttcccaagtagctgggattgcaggcacacgccaccatgcccagataattttttgtattttagtagagatggggtttcaccgtgttgcctaggctggtctgagctcaggcaatccacccgcctcggcctcccaaagtgctaggattacaggcatgagccaccgtgcccagccttatcatcccttttctgcagataagtaaagatgaattaccttgccaatgtcatgtcactgtacgaggtggagctgaacttgggcctaggatgtttagctcaagcttaactactgctccaggaatctaatgcgctgccactcgaacttcaggaagacaagagctcagacactgaaaaccagtcagcaaggccaaaacaagagagcccccagttctgccaacttggtgcaatttttactataaccatagctgggaaaaatgaagaagaaaaaaattcactggagttgcaatgaatatttaaacattgcgtcaagtttaaagcatgatgagtgtcaagccagttgagttttctgcattaacttcagctgacaactcagtttatatctattataaatgtcactatttgttgggggaaaaataatcttcctcttttttatttttaattttttttagggataggatttcattgtgttgcccaggctgaagtacagtgatgtgatcattgctctctgcagccttgaactccttggctcaagtggtcctcctgcctcagcttcctgagtagctgagacttcagagtcacatcaccatgcccagctaatttttttttttttttttttttggtggagataggaccttactatggtgcccaggctagtctcaaactcgtggcctcaaatggtcctccagtcttggcctcccaaagtattgggattataagtgtgagccattgtgcccagtttaattttcttcttttgccaaagcaaagctaataatttttttatagctaagatttaattatgtttggattaaaccttctcttcagtatgtatctcatacttttcttttgctaaatacttatctagcttgcatttttttccacattaaggagaatagctcttggaaatcttatattctcctaactctttatcttaaaatgctgccacaaaatcttagacattgaaaagttattaaggttctagttgagagtttactaacaacaaaaagaaggataattggcaaagaagacgtggattgagtgagccacatagcccctttcctgttctggtttcttggtggcatttgcagcagtgcctctatgatgcctgagcaaaactggtttattgggaagtgatgtaaaccatactgccagtgcttttgctcagcacttgggcacttcgtggccgtgtgtctcatatgatgttcataatgcttttttttccctctccttccccccgtaatactttatgaatagatgtttccacttctgaatagttctccgattagaatagcagttacaaaatgggtaagacttcacctcgtcctttaaaacaggaaaattgatagaattcctccacctcctttcattactgaggctgtcagatgattctttaagcaaaaccccagtgttctcttgtctgatgaagtcagtgtaagtgatggtatttttacattgactttaatatgaaaggaactgtttaattgaacggtttcatctcaaggccaggctttagactccttcttgggctcatgcatgggatccttcttttgcacacctgtggcctccctggaactacttctggtggtttccctggacttagtatcccccaaacctggcagcccagggcctagtgacaggcagaggaatgtattgctcttgctctgtggggtcaggtagggccgggggaggtcctgcatgaatattttcagtgctgattcagaaagagcattgggcatacacttcaggaaaccctacctggaagctacagcagcactgctctatcctagactgaccacttcagatatttccaacgcggagctggatgtggctaggaaccggctcccagctgaatagcttgtgctgagtcattatcaagttgcatttcctggctcaaccaaagataagcagggaagaacctaaatgaaaaatgactttcagactgtgatttgggttagtataccacctcagggcagcaatggagtcatgactgcacagacacgggaaaggatctggttgcagaaaccaagtgagtcagtgatgatgtatcatcattctaaaaaacgtacctgtactttcttttttttttgagacgagtttcactcttattgcccagactggactgcaatggtgcgatcttggcttaccacaacctctgtctcctgggttcaagcaattctcccacctcagcctcccgagtagctgggattgcaggcatgtgccaccactgcttggctaattttgtatttttagtagagacagggtttctacatgttggtcaggctggtctcgaactcccaacctcaggtgatctgcccatttttgcctcccaaagtgctgggatgataggcgtgagccattgcgcctggccgtaacagtgtactttctttctttcttttttttttttttgagatggaatttcgctctgtagcccagattggagtgcagtggcgtgaattcagctcactgcaacttccgcctcccaggttcaagcaattctcctgcctcagcctcctgagtagctggaattacaggtgcgctccacaacgcccagctaattttttttttctagaagttgaattgtacaaagtacacttatattttgacacctgatccaaaacacagtcatgtaccacattacaatgtttcaatcaatatatagcatacaaaaaaaaaacaacaacaacagtagtcctatgagataagagctgaaaattccttattacttaaatgttattttgaaagtcaacatttttcttctacatattttactcataagcatggcaaaatgttacaggtctcattgtcaccactgcaatatgcatactgtgatggaagcataacctatctcaatttagccacattaactatttttggacaccttgatcaacagtgcccattctcatctagcatgaggctttttttttttggagacggagtctctctttgttgcccaggctggagtgcagcggcgcaatctccactcactgcaacctccgcctcttgggttccagcgattctcctgcctcagcctcccgagtagctgggactacaggtgtgtgccaccacacccagctaattttgtattttttagtacagacagggtttcaccatatcggccaggctggtctcgaactcctgacttcgcgatccgcccacttcagcctcccacagtgctgggattacatgcgtgagccactgcgcccggcctacgcccagctaatttttatatatttggtagagacgggatttcaccatgttggccaggctggtctcgaactcctcacctcaagtgattcgcccacctcagcctcccaaagtgctgggattacaggcgtgagccaccgtgctgggccttgtactttcttgaatgggaagttgtcttcatggtgagcagctcttctttgaggtgtttatttgaagtattcaaaagaacagagagattccagtagggaacaatgaaaatattaaggcttctatatcatgccctgtgagggaaagtagacaaagatgaaataaacttcaacaagagactaaaaaactacttgagtgtttttgattaccaacttttcatgagctgaatagtttgaaaatttgctgcttttctaagttttccctttaagatcagggataaatcatttcctggaaggatatttttcactgtaagctctttctgtttctatgttgataatctaatctgaataattaagttttattgagaccttccttttgaaagtaacttgttacctatgtatgattaacctggctattattctaaatgtagaatttaaagtgttttatccatggtagctcacacctgtaatcccagcactatgggaggccaaggtaggaggattacttgagcccaggagtttgacaccagcctgggcaacatagagagaccctatctttacagaaaataaaaagaaattagtcaggcatggtggcatggccctgtagtcccagctagctacttgggaggctgagatgggaggatccgcttgagcctcggaggttgcagctgcactgggctgtgattgtgccattacaacagagtaagacagagtctcaaaaaaaaagtgttttatcatttatgtagagcttggagtttcaaacataaagtagaattactttatcacttgtaaaaaatgtgttctctgaaagttgataaacaatgaggtagaatgactcctgaaattaaaaaaaataatagcaggactttaatagataaatctgaaataagtacgatgaacaattttttaaataaaatataccctgaagctaatactttgtaaataccaacattttctttatggctatagtgtaaccaaattcaggagtaagtaactcaattatttggctgtcgggttgatggaatgaaaataaatttcttagaatatgatatgaaatatgatatgaaattcaactttactaaactttactgaacaccagcaaatgtatttacaatcctgggttctatttgtcaatcacagaccacccttttttctgagcattttttctgttctgagttcacatatggggttaggttggcagtggataaattccagtccccaccctttaatagggcatggaattatgatgccacacaaaataatttctgtatgtgttaccctgcagatcatgcacctataaaagataaagaaatggccaggtgcggtggctcatgcctgtaatcccagctactcgggaggctgaggcaggagaattgcttgagcccgggaggtggagtttgcagtgagccgagattgcaccactgctctccagccttgtaacagagcgagactccatctcaaaaaagaaaaaaaagaagataaacataaaaggtttccattgctatgatttcaattctagggtggagctcagggtttggcaaggttccctacattattagactgcgcattttaccctttttcaaaagcaggtaaggttgtagtgtagagtgtggctagtgattctcaaccctggctgctcattagaatcaatggggagcatttaaacctccccatgcccaagctgttccctaaccaatgaaatgggaatggtgggggcctaagcatcagtattttttagagttccccaggtgattctgcttgtgtaccaaggatgagaatcattttactagattcagctatgtgggaatctttcggctattttagaaaacatggtgacctggctgggtgtggtggctcgtgcctgtcatcccagcactttgggaggctgaggcaggcggatcacctgaggtcaggagttcaaggccagcctggccaacatggtgaaaccacatctctactaaaaatacaaaaaattagccaggcgtggtggcaggcacctgtgattccagctactccggaggctgagcaggagaattacttcaacccgggaggtggagattgcagtgagccgatagtgccattgcactccagcctgggcaacaagagtgaaactccgtctcaaaaaaaaagaaagaaagaaagaaagaaagaaagacaaaagaaaacatggtggtcagtgaattaaggtggcccagttaatatccagtcagttcccacctgaatgtcagatgtcctggagtgctgagatgtgtccagaattgctagctacccagctagaaaagctaccgcaaggtcatctcgggaaaagggaaccacaaatgtcccagttaagaggatggatagtttcccagggttggagtcctttcttttcctagtcacccccaaacacttaagaggcctatgggatgggcaggggagcagggagagcctcactcctctcccatctgttgggagagcctcactcaccaaaacagcgttgccttgtctgtgtcatatgcatcatgtgagtgcatgaagtcccttgctccagggacttcccattaggcctggagtgtctcccatgcaaagagcccgctcctctgttcctgggacacacctctggcagtcccagaggttgcccattcatcttgacttctggaaagaagcctatagtgagaaaggagcatgtagtcagaaaccaccaagtgcagcatagttctacataactcacagcattcagtagttttgtgttgttgcttttctttctttttccatacagtagttcatctgatatgtgcagttacgcagcacctgttaagtcagagggctgggatggtgaggtcgccctgtaaactctgggcaaattactccatttctgagccatcttttgccatctgttagaatttctgatcaggatttaatcggggttggttgtgaaagagtatatgaacatgctttgataaagaagaaaataagtgggccaggcacagtggctcatgcctgtaataccagtactttgggaggctgaggtgggaggattgcttgaggccaagaattcgttttttttgttttgttttgttttgttttgttttgtttttgacagagtttcaatctgtcgcccagactggagtgaaatcacacccagcaatggcgtgatttcggttcactgcaacttccacctcctggcttcaagtgattcaccttcagcctcccaagtagctgggattacatgtgcccaccaccacgcccagctaatttttgtatttttagtagagacagagtttcaccatgttgcccaggctagtcttgaactcctcacctcaggtaatccacctgtctcagcctcccaaagtactgggattacaggcgtgagccatcacgcctggccgaggtcaagaatttgagatcagcttgggcaacgtagcaagacccagtctctaccaaaaaaaagaaaaagaaaaaaaaaagagagagagaggagagagagagagaaataaatgaaatgtatcccagttgaacaacagttgagctgaggtgtaagcctccagatgaaggaagaaggagcagccctcctgtaagctgagagccctgtccttaataaccctgtcctattgagaatgatttttcctcttcctggatcatgaatgcttgctcagtgagccattgccatcccttgcaaaacagactgaccaaatgctggcaaggatcagggagacgagtataaacaggtatagccacttgcaggaaaccctttggtcatttcttagaaaatctacatacatctacctcatgaccaaggaattccacttctagatattaatccaagagaaagaaaaacataggtccacaaaaagacatgtccagttctatatatggcagctttattcataatattatgcaaccctggaaatatctcagatgttcattatcagaagagtggttcaaaacattttgatatattcataaaatggggtattactcaaccaaaaaaatgagacactgatatattcaacactgattgaatctcaaaaacttttttttcacctataacgtattctatgataaacattattttcaataaaataagtcaaacagataagaatatgcacttcatttctgtgaagttcaggaacagggtcatgagaggggatgccttagaaaggagcaccatgggcctgtgaggtgtcaaggaagctctgtgtctggttttggaaggtggttacgtgggcacatacatctaccagaactgatgtcagcacagttaggatctttacctttcattgtaggtgctttttttttggtggaaaatcaaacttagttgggcatagtggctcacgcctgtaatcccaggactttgagagacccacgtggaaggattgcttgagcccaggagttcaagaccagcctaggcaacatagggagaccctgtttctacaaaaataaaaaaattaacaggacgtggtggtgcacgcctgtggtcccagctactagggaggctgaggtgggaggattgcttgggcctgggaggtcgaggctgcagtgagctgtaatagggccactgcactccagcctgggtgacagagtgagaccctgtttcacataaataagtaagtagtttaaataaataaataaatacaaatttttaaaaatgtatatctaaataagagacagggcttaattactattgcaaacattttattaccttagcagattgtaagggttgaaaccaaaacttcaagttttacttgtttagaaactccaacagttctaatgaataaagaggattataaaatcctgggaaggattagcatatgctgcttgaggtcacactgctcgttagccataccatggatgatttgcaggcaacccgttttttcctcctaagcttgaaagctaaaaatagaattaaaggtgataagggcatcaattcccagacagctaagctgtttaaaccatttatttatttatttatttatttatttatttatttatttgagacagagtctcactgtgtcacccaggctggagtgcagtggtgcaatctcgactcactgcaacctctgcctcccaggttcgagtgattctcctgctgtggcctcccaagtagctgggattacaggcaccccccaccgcgacctgctaatttttgtatttttcgtagagacagggtttcaccatgttgaccaggctggtctcgaactcctaatctcaggtgatccgcccacctcagcctcccaaagtgttgggattccaggcctgagccaccgtgccaaggctgtttaaaccttttataattgcacattcctttttagatataattttctttcttttttacttatacaatattaagaggtgcaagtgcagttttgttacacggatatattgcagagtggtgaagtctgggcttttagtgtaaccatcatctgagtagcacacattgtacccactaagtaatttctctctcacccctttcccatcctcttaccctccaaagtctccattgcctgtcattccacattctgtgtccatgtgtgcagattatttagctcccacttataagtgagaacatgcagtatttgactttataaattgttttacttaagataatggcctcctcttccatctatgttgctgcaaaatacataattttattcttttttatggctgcaaaatacataattttattcttttttgtggctgaatggtattccattgtgtatgtatatatatatatatatatatacacacacacacacacacacacacacacacacacacacacaccccacattttctttacttttatttcttcatttatttttatttcaaacactagtgtcaagggctttcagtagatcatggcgaatttgcttctctgctaagtaggaaaccctgacccagaagcaggtgggtctaggacccagaatccaggttccccatgaatgtgtgccacgtgatgggccagggtgcgactgcatttccagctgcaccctgtttcccaggaggagggcctctctgcactggaccccagtcctggcattggggagagtagtcctctagtggggacagtggggaccagccatccagggccaacaaggcccatggaggctctgtggcgctgccataggttccacctgagtgggattctgacttggacatgttcagtcataatcccacagatggcagattcgccccattggctcctcagcacattttctttatctagtcatccgctgatggacatttaggttggttgcatatctttgctattctgaatagtgctccaataaacatacaagcacttgttctttttaatgtaatgatatcttttcttttgagtagatacccagcagtgagattgctgcatcaatggtagttccagttttcattatttgagaaatctccatactgttttccacagtagttgtactaatttgtattcccaccaatagtgtataagcattgccttttgtctgcaacctcaccaatatctattgacttcttgtttttccacttttgaataatagccattctgagtggtgtaagatgaagtctcattgtggttttaatttgcatttttctgatgattggtgttaatgattagtgatgttgaggatttttttcatatgcttgctggctatttgtatgtattttttttgaaaaatatgtattcatgttctttgcccactttttaatggggttgtttgtgtgtgtgtgtgtgtgtctttttttttttttttttgagttgtttgagtttcttgtaaattctgcatattagtcctctgtcgaaggcatagtttgcatatactttctcccattctgcaggttgtcggttcattcctgttgagtatttcttttgctgtgcaaagctttttagtttaagtaagtctcatttgtctacttttgtttttgttgcctgtgcttttgaggtcttagtcatgaattctttgcctagaccaatgtccagaagtgttttccctagattttcttctagtatttttatgctttcatgtcatacatttaagtctttaattcatcttgagttgatttttgtatatggtaagagatatggagtccagtttcattcttccgcatatggcaaccagtttttgtagcaccatttattgaaaagggtatccttttcccagtgtatgtttttgttgactttgtcaaagatcagttggccgtagatttatagctttattcctgggttctctattctgtcccattgatctgtgtatctatttttatgccagtaccatgctgttttggtgactatatccttgcagaataatttgaagtcaagtaatatgatgcctctagctttgctccttctggacaagattgctttggtatttgtgctctcttttggttccatatgaattttggggttgttagacataatttctaagatatattcaggtttcacttttgttctttaattttatgtattttcttcccaataaggctataagcttaagtcaaaaattgttttgcttatagctgaagagtccctgctttcagcctgccttgtgattttcatcttgttgcagttgaattaggtttgtggcacctctgctttttgtagttttcgtatcaacaccttggtttttggctttttactaattttgtttttttttttttttgagacagagtctcgctctgacgcccaggctggagtgcagtggtgcagtcttggctcactgcaacctccgcttcccgggttcaagcgattctcctgcctcagcctaccaggtagctgggcctacaggcgcccacctccatgtccggctaatttatatatatatacatacatatatatatatatatacatacacgtatatatacgtatatatatacacatacatatatatacgtgtatatatatgtacatatatatacacgtatatatatatatatacacacacacatatatatatacacgtgtatatatatatacatatacatatatatatacgtgtgtgtgtgtatatatatatatatatatatatatatattttttttttttttttagtagagacagggtttcaccatgctggtcaggctgctcttgaactcctggcctcaagtgatctgcccaccttgacctcccaaagtgttgggattacgggcgtgagccaccgcacccaaccggttttttactaaattttaaaaattacaaggttaaaatacaatgaaatactcaaggaattgcgtgaaccatctcttttgtacagactgagatgactctcctggtgaccctgaactcgtaggggcagcaggtggaaatgtacattcactacttggtggaaagaagtctgaattggggaagtatttatacatatgtgaaattccattgtactagggtgtcctgtattttatctggtaaccctgggggcagtcctatgagctgcggggcacctgccctggagactgaggcagggagtcaaagcgacatgagattggggataggttttgcatgtccgtggaaagggcttgctgatgaatttgatttgaagattgagaaacagaggaatcaagggcgacttcttggttttaaacttcagcacctggtgccctttactgagatggagaagatgggaggggagtgggtttcaagtgtgttgtgatatggacaggtcttattgatggggtgtggtgggcgtccaaatggagatgtggaagtttgattctgagtgagctcaatatcgtcgtggtgtgttctaccacgtcccttctagccctttccgcgctttctcccatctagtgtttccctgctcaaatggaaggagagaggaacaacttagagcacagtgtgactggggcaagctaccttagagataatcatttaaacaccagctagactgctgcaagaaaagaaatgatggtaaaaataaatgtactccaaaggaatttgactaaagaatatttcaccgtgtaacacatttctgtgtgccccttttgcaatgtatcattaaggatgcattgctaggcataatgaaacaaaatgtttttcgtaatgaagtggttattttgcaatgaaagccagtcaaggaaagaaatcaggcttgaatactcctagtcacaacctttataaaatctaacgttatggttagactataccatgcctgcgcttaagtagtttttgaaattttaacccaaataagaaattcttggctgggcatggtggcttatgcctgtaatcccgcactttgggaggtcgaggcaagcggatcacctgaggtccaggagttcgagaccagcctggccaacgtggcgaaaccccgtagctactaaaaatacaaaaaattaactgggcatcgtggcacatgcctgtaatcccagctactcaggaggctgaggcaggagactctcttgaacctgggaggcagaggttgcagtgagccgagattatgccactgcattccagtctgggtgacagagtgagactccatctgaaaaaaaaaaacaaaacaaaacaaaacagagaagaaattccttcattataaggaaaaaagaaatgcacataagcacagttacaatattatatttcctgattaaaaatatgtattcttttaatggactacaaatattataatttttcttaaaatggcccgtgtgtaaaaagtttattcccctttactttacttttatatagtaatgaaatttcataattaaatctatattttgtattatcaatatttaaccactagaagaattgatgatgctacttattaaaaatgacaagtgatgtaatagagttagtgggatgtctgcctgttgaaaccattttactaggtaagtatttttattacaaaggggttggatataaactggcctcatatccaaaaacctttttgcaaaaatcaaaactggatatatcctgtgttcgcttccttttccctgggcccctctgttaaaatcttttagcaaaaagattttaccaaataattcacattgaaatataaatagttttaaagtttgctatgttgctttctttccaaaggtattcagattttagtaggggacaaaagtgtcccctaagtcaagtgagtataagaattacctatattgtttgctacaaatgcaaatatccacagcctccttgtaaagtctcattcaggggctgcctactgcagggcccaagaatctatatttttaacaaatactctggtcattcttgggactagcaaatctagaaaacaccaacttgaataaaacgattaaagttgtgcttgctgaatttcaactacattaaaggtaccagtgctggaggagatttttgaggggttgaggagaaataattacacataaattattttattaatgaaatgattcagcaaagtgtaaacgcccgtaatgggcttggcagtgtcctggggctgaaggtactgagtagaataggacgtgagacaagtgctctacttgaaataagcacagacgtggaagaagggatgtgtagttttgtctggggattcggcacagtttttatggaggatgtggtctgtgaaatggctgatttgaaacatgaaggaggctgcttatgggatgggttattctgggaagcaagcaagtgcgagggcaccagaaggtatgaagggccttggagtactgggctttcttatggctgcgagagaggatgagttggaatgagatgagcagcttatgaaaccaggaagacaggttattgtggaggagtgacttgctaagctctatcagatgagcaatgagcagtgaggaaacaggggagagatgaaatcatggctgcttttggaaagataagtggactagcatgcagcatggagaatggagaggtggagggttgttgttggtgtgtgtgtgtgtgtgcacgtatgacagagagagaaagaagagggaatatgaatggcatgggaaataagagaaaggcaggccaggtcagagggtttttaggatggcctgtgaggtgtaggagggtctggaggtcggccgtggagtggagaagagattgaggactcaggcactaatctaaggggaagggggacactgtattctaagggggccagtcctgctgctccctgtaagcactttatgtatttgacatgaaatatactgagatggcccccatactttagggtgcaaatgctcccctaaagtgagagtggaagaagaaaaaaggagaaggcacttatttgctcatgtgagccgtgtacagttccttcagagctcagagaggcactatgcagtgaatcaagccaggtcagctgctgggactaggggcctgggtaggtcacagccctgccggccatccacatgccttccaggaacaccccaatctctggaacctttcctgaggcctccattttcaggaattttgttaggaatccagataacagaatggccatagtggtgattatgttccttctacctccttttcatcagcctcgctcaccttacccttccagacatgagaaaacagtttcactacaatatccagtagatttacctaattggtaaaataagaaaggccaaggaagttgctcttctcttcactcccacccctcctgttcattttgtttgtaacaatagagccaagtttcaaacaaatgtagaaaaggtgagcaatgctaatgatgtgtttcagatgggattcagggacaactcaacttgaaattgtctcttagccatctgtttgtgtgcctggggtttcacctgctttgaattagggtaatttaataattgtgaattagactgggagagtacaaatggttttgttaattagattaaaacgttacattttataatacttactgtattaaccatgggctgatgacgctgcttgtaccctgtgttaaagccttatctattatctgctctttcttttgaaaatctcttttatttcagtttccatcgctgtgttgcagctgtccaacctctctggcattctagaatggatgctgcctgccttccatattccaacgcataaggttctttgcctgatgtcttgtgaacatacacaccgcaattccagataccattaagcctctgctatccaggtttatttatattaactatagtttgtttaaatatattttattaaactctttaaaaaaatacttctgtgaaaccagaaccaaacaaagaagtatttgaggtcctggatctttaaattttgtgatcttgggcctggctcatgcctgtaatcccaacactttcggaagccaaggcaggcggatcacctgaggtcaggagtttgagaccagcctggtcaacatggtgaaaccccgtctctactaaaaatacaaaaaattagctgggcatggtggcggatgcctgtaatcccagctactttggaggctgaggcaggagaatctcttgaacccaggaggcggaggttgcagtgagctgagattgtgccattgcactccagcctgggcgagaagagcaagactccgtctcaaaaaataataaaaaattaagaaaaataagtaaattctccttacatataaaacatatgaagcagtgctgccaaagagagagagagaaagagaaggaaagagagagagaagagagaaagagagcgagcgagcgagagacatcgaggataagagagaacaaagatgatgatttctgaaaaaaaggaatggatattcaataagcctgtacttactatcaccataagctctaagatatgacatgagtatgtttctattttaatacctctaaactcacaattaatggcatcttaatattttaaagggtagccattgttttaaaagcatataaaataatggtataaaaattagagctatcttaagttcagtaaatatagaactttgagtaagtcaatttgataattcccctttatggtaaattatctcatgatagtttcatgtttaactaaatcttcagaaaaaatttttattgagatgatcattggctaaaaaaaatggtggtatttgattggttttaaagagacacttattttgttttttgaggggaaagtgaatattgagaaaaaatagtgactgtgttcaatgttacgcttttaacatcagtaaactgcaactgacaaggctgtttcctattacctactgttaaatggccctgttttctaacttaaaaatggtgcttctaaggctaaaccttcaatttcttctggactttgtcaggttactttgggtgattttgaaagatttccatacataatactgctctggaagggtgcgtgcgaatatggttcacaaaagcagtgaagacatgtatctacaccgaggacagcatgtgagctacactgcaacaactgttttagatggccagcctgtgtttgacgatgatccctgagtgccagatgtgaaggaaaatataaatccctcaccatgtcctgaattccacaatgcctctccctcctcccctgggagtggagccaggctgacctctctctggctccatactggaaatgtgtgtggcaatggcagcattgccctttaccccatgcccaatactgcaatggcaccttaggctgtgtgtgtgtcagacagaaaaataaaacatcagatttttgttaattttgggtgatgagtgaggtcagggatagttattattttgagactgctatttttttttctcttttttaaaaacagatggggctgggcacaatggctcatacctgtaatcccagcactttgggaggctgagggaggtggattatttgaggccaggagttcaagaccaccctggccaacacggtgaaaccccgtctctactaaaaatacaaaaattagccaggcgccgtggtgcatgccagtaatcccagctactcaggaggctgaggcacaagaatcacctgaacccaggagacgaggctgcagtgagccaagatcacactattgcacatcagcctgggtgatagagtgagattctgtctaaaaaaaaaaaaaaagagagagagagagaaagatgggatcttgcgctgtcacccaggctggagtgcagtggtgtgattgtaggtcactgcagccttgaactcctaggctcatgtgatcgtcccgcctcagcctcccaagtagctgggactacaggcatacaccaccacacccagctaattttagttttttgtagagatagggtcttgctatgttgcccaggctggtcttgaacttttggactaaactgatcctcctgcctcagcctctcacagtgctgggattataggcatgaaccaccaaaaactgcagtttaaaagtgtttatatcctggatacactaacagcattttgtccaacttgtggagtggagggagtagggaaggggaggatagtgctaatgaactgtgacaggggctagcaagaaagaaagaaaaagagttccctaagtaagctcctactgggtgtcctccactcacatggagacagggccctgccttttaggcacttactcttccagtgtctattgcataatatgttcaggaaggatcccagattcaaagatttatagaattagagttaaaagggatagatatcttgtttgaccctgaaaaaattaaggaatatgcttgagatattcaatggcagaggctggaatagattttcccaaatctcctgatgtgaagttctgtgtttgtcaaacatgactgtgtaaaaagattaatttaaacttaatgacatgttgtattcatagaagttctttgggtttctgtggaaacctcctcttgctagcttaagcagaaatgggggatttattggaaggaagctgagatattgcaccaaactgcacaaaattgaatgaagagctgactaagcaaggctgcactgagaaggaaccagggtggtctgggctgtggtagcggcagcagcagcttgcagatctcccagcgctgatgctggctcgactcagacaggtctccactctctgctgtctgtctctggctcagacaggacactttgtgtggctgtttccttccacaaggcctcagtgggagcaagccagcctcccacaggcctctgagacagaccaccccattcctccctctcctgttaacctgcctttatttccttaattgcacttatcaccatgcagaagcctatgtgtttgttcccctgtggagatgtaaaaacactgatgcccaggcctaactcccagagactctgattgaactggtctgggctatggagccgggacatttgcatttttcttacaagctctaatgtgcagccaggattaagaatcattgccttctgcatcaacaggacaaatacaaaatgtgcagcaaaatatatgtttaagtgaatcaagaagacagatctagaaacgattgttaaggaataataatgcattttgtccatcaccacacataagtgatgttgaccagagccctcccagattgagtggtgccaggtgttcggggttgtctcggttaatccttactatggccttgcggggtagggggcagtgtcctcattgtccaaatgagtcactgaggctgagggattcaggctcagtgtatgcccacagttctttggcaaaccccaccactgggccagccaactacacggggattctgatcgggtcctgatgggtgcccatgatgggctgtgcaaaagtggtggtgagatttctccaccttcacggaggtggtacccaggggaggtggacttcagcagcgagaatgggctgggtgcagtggctcacagctgtaatcccagtgctttgggagttcgaggcaggagaattgcatgagctcagttgttcgagaccatgggagaccctgtctctacaaaaaaaaaaaaaaaaaaaaaaaagtgatagtagtcagacattcccgacaggcaggactgttgaatgttggtctgtgttaccaggagataacacattttaagcagaaataataggggagaaagaggatctcaattatttcaagaaaagcaggacttgctgggctttcagggctaattaaaggaaataggaaaagtgaacatgtgtgagaatctaaacctaacagttgtttattgaaaagaagagaaagagtggagagggaaatgaagttttgatttttgcctttttaggaaattgggatataatttagtgttcgtactttaagttagtgtagagtttgagtgagaagaatgaggaacataaatatgaatgctctgttaatatagtgcttttcatagaaataatggaatagaatacgcttcactgccgggtctggaaaccctccctctgtcagggtgatttagaaattgactgattttaccatggagggatgggatgggccacaggctggggtttgaagaaagaatctataatccttttggtcttaactattaggcaaatttagcttcctggtctcagaaagaaaaaacacacccacaaaaagaaaaacccatgcccgtgggaacaagtaacttcctcctcctggggctgcttgaaaaccctaatcttcctctcaccaggccaagtcccttcccttctcagcgggaggccagctggggcatccaaaaagccacaacgggccctggggagggagaatgcacccgtctgggtgagcagttgaacgtgcattggctgaggtgtgaggctcgggaaatggctctccaggcaaagacgctgcttggaggcaactttataattctttgtacctgggaaagtgaagggttgggcggggggagtgggggtgggagctttgtcacgtgaccccactctttgcttctttgtctgtcctccaacttaacatggcttgaggctgaaaaacagaattcctcattttttactcagtgacaaaatcagagaaaaaagtcaatgccaattgaaaaagacatctgcaaacatagaactgttttttctgccaaatatgtgagcatgggctgtaaatatagtaaaataattcagcagattaattgtgggaaggccagtgtgagttggggaagaatctgaaacctggaccactagaattccagtaaagtgaagagagggatagaattgaggtagagctgggggacttggggacgcatcagacattatctggagtgctgtgaaaattacaccgctttctttgttagcaggattcccattcataaagcctctttagcaatttttgtttaacaattttgtttgtgcagaatgtcacagcaacatttcttaagtgtgatcatgtcactataacctggctttccttgttttggaggacgggggcggataatgggaagtaacgcattgtttacttgctctgagagagcatttaacatatgctatttcatttaatcctcatggtgacccctgatggaggactgttatctacccttcacagatgaggaaaatgaagtttaatgaagtaacttgcttatgtttatatgtctgttaataaatggaagaacaaggatagacccaatttcccctcattccaaagtcctttgctgctttacttcaggaaattttttttttgagacagtatctcactctgttgcccaggctggagggcagtggcataaatcttggctcactgcaagctccgcccctcccccccttgcccttccccaccacccccccaccgggttccagcaattctcctgcctcagcctcagcgggattataggcatgtgctaccacgcctggctaatttttgtatttttagtagagacagggtttcaccatgttggctaggctggtcttgaactcctgacctcaggtgatctgcccgccttagcctcccaaagtgctgggattacaggcgtgaaccaccgcacccagccaggaagatttttaagtaaaagattttcagcccacattctttgaatgatcacagattatcagataatgggggacattttgtttgttttcatcgtctagatacgtctgaaacgaaaacaattttgggagttaacatttattaatcatctattataaaccaaatacattgtagctaataattaaaatatattctattacggaattgctgctgaccacaaactatggaataagcacgtggaatttctaagttcactttaattcaacaactggtgctttgttgctgacttggtaaccaggtggcccactgtgtatgttttattgaagcaagttgtctgcaaagaagcgggatagacagggtctgtcctcaaggggtttacagtctatcgaggagagagctatacacgtactaactgatagacacctctagagttacataacagacataaagttgtacataacagacataaagttgtactataagagatgtcctggggcttgggacgaaattccaaattgattgtggagagaagaaatctgaggggagaaggatgtgggctgctggagaccaggcaagatgggttttgagttacgtttggaagacaggtgagatttgcataaatgggtaggagtgcatgagccaagatgaaaaggcaggtgatgccaccgtgccaattaggagtctaacatttggagtaacacaggtgatggtgaggcaggttgaggccagcctgggagaggcagggaggggcaggttgaatatttcaggttttgtcctgttggcaggagtgttgatagcagtattacaaatgatggtatattagtaataataatgtttaaaatgtattgagcatttactccactggatactctttattccacagatatttacagagcatttacaagtgccgaacaatgtttcttgcactgataatacaagggtgtgcaaaactgacaggaatccctgctctcatggagcttacagtaacagaggagcgatggacagatgataaaataggtacattcttccgtgggtgctgtagggaagcataaggaaaggagtgggtggagaatgaatggataagggagatcacagtttcatttttattttttctttgggcagagtctcactctcactcagtctggagtgcagtggcataaacacagctcgctacagcctcaacctcccagacacaagcaattctctcacctcagcctcctgagtagctgggcctacaggcatgtgccaccacgcccagctaatgtgtttaaattttttatagagagggggtctcactgtgttacccagactagcctcaaactcctgggctcaagcgattctcctgcctcagcctccccaagtgctgggattataggcatgagccaccacacctggctgacatcacaattttaaagcctggttctatgtgtgccagtgtattaatttatctaatcaggtaaataataggtagaagacagtctccgaagaattataaacgtaggctgggtgtggtgactcatgcctataatcccagcactttgggaggccgaggcgggtgaattctcaagagttcaagaccagcctggccaacatggtgaaaccccatttcaactaaaaatacaaaattagccgggagtggtggcacacgcctgtaatcccagctattgggggagctgaggcaggtgaatcacttgaacctggcaggcggaggctgcagtgagctgagattgtgccactgcactccagcctgggcaaaaagagcgaaattccatcaaaaaaaaaaaagaattttgaatatgaagtaacatgaaaatagaattcataaagatgagtgtagcaaaacgggagggtgccagctgggaggcaacctcagcaacctgggatggttagacgtagcagggctgttgtagcaattaatattaggtagggtttagtagagaaaggagaccaatatagggaaaagaaatcaaaactcactatctgctccatgcctttccgagcctagaatccaagtgcaattatatcgcaaaactgacagggcttgagggagggtggacctaatgagtaaaatgtgaagcgaaagtgacaggatgactgagggtttgagcctcgggtgactggaatggtgagaaaaaacaattttcagtaaggaagatggaaattcaatagaattgtctgtcatactatttaagtaatttaaaaattttttgaaacgaattgggggtggcctctaaggtactgatcctttctgagagtcagtagtttctcctaatggcagtgcgggcaatgtgagagataaagcaggtgggtcccggtgccaggagaactgcttccccttcccagcacatctgctcagtttccgcctctctgtcaagctacacctgctctgtcctaacctgccatccactgcttcccacttccaaaaatttcttgcttacagattcccaaatatgcttgcttcacagcattctgagtgtctataattttttcaaggcaacccgacagcagaaaaaatacaggagagtttcagttagtgaatatttaggtcaaacaacttttttttttgagacagggtcttgctctgtccccacaggctggagtcagtggcacaatctcagctcactgcaacctccgcctcctgggttcaagcgattctcctgcctcggcctcttgagtagctgggattacaggcgcctgctgccatacccacctgatttttgtatttttagtagagatgaggtttcaccatgttggccaggctggtctcgaactcctgacctcaagtgatttgcctacctcggcctcccaattgttgggattagaggcgtgagccaccgcgcccggccaagatcaaacaacttaataaatgtttgttataatgacttagtgccatttgaaaaaaaaaaatacacatacattgaaagaaaaatatgtttttatattattcttaaatgaccacagttattctcaaatgggatgtgtacaccctgccgcacaacttctccaaccttagaatcatattggacacccacattctcactttctggtggtacttgttttttctttttctttcttttttttttttattatagcaaccacagaaaacccagttttacaaatatatgctgctgttgaaaggaagatagcatgatctaatgttgaaacagcactaccttgagtgagtacctctcacgatgtgtgagagatgtcattgtgtttcccttgaaaatttgaaatatcccagggcacctctgtgacttcaccatggcaccgggagggcctcaaaacacagtttgggaatcatggtacaggcctgttctataccatctgttttccttctcaattttatggcacttcttggcatcctcatttttttttttctttttttgagatggagtcttgctctatgatccaggctggagtgcaatggtgtaatcttgactcactgcaacctccatctcctgggttcaagtaattctcctgcctcagcctccctagtggctgggattacaggcgtccacccaccatgcccggcttatttttgtatttttagtagaaacggggtttcaccatgttggccaggctggtcttgaactcctgacctcacgtaatccaccccccttggcctcccaaagtgctgagattacacgcatgagccaccgcgcccagctgcatcctcatttttaagaaaataactggatccagccatgaccttccatttcctctttttcacctttaaactcctagagtgagtttacagtgactctccagttcacttctagtatcatatactgcagatatgtcacttggtaagtcactgctttggcttcaagcttagtccaaagaatggtttcccttttgtttgttttgagatggagtctctctgttgcccaggctgcagtgcggtggtgcgatcgtggctcactgcagcctccgcctcccaggttcaagcgattttcctgcctcagcctcccaagtagctgggattatagacacccaccaccacacctggctaatttttatatttttagtagagatgggatttcaccatgttggccaaactggggtgatccgcttgcttcagccttccaaagtgttgggattacaggcgtgagccaccgtgcccggcctctttttttgtttgttttgagacaggttcttactctgttgcccaggctagggtgcagtggtgcaatcaccgttcactgccccctcaaactcctgggctcaggcaatcctcccacatcagcctctggagtagctgggaccacaggcgtacaccaccatgcctggctaatttttaaattttcttttgtagagacgagtctcattatgttgcccaggctggtctcgtactcctggctcaagcagtcctcccgcctcacctctgaaagtgctgggattacaggtccgagccactgcgctccaccagaatgttttccaattctcattccaccatatttcttttgcgtttaaaatccttggctaggttcaaattattgcctggcttttgaccttcatactttaccacaagctcatgaatatgccaggccttaagggagaagggctttctatgtctttgtcttctgtgaacccatttaaactccaccacagccatgcggggatgggcgttattattacctttttcatgggtgaggaagcaggccgcccgtgacaccaaggcatcagaatggaacggaaacaccatctagaggtgctgcctgtccacagttatggccaggttcctgaggacaccctggacgctggtgactggtataaataagtgtcttgctgtgtttgatttttaatttttacaactatatttttataaaagtaaatcattatagctcattgtggacactttagcaatgaagaaaaagaaaaaccaactcaccacagaagcatacaagtgtttatgtaaaaatttttgattcagtttaatttgattttaatattgcttccaaacatttttattatgtaatcataatgtatataaaactttttatcttgttttataaaaattaaattataagcattttttatttaattacacaattattttagccatccttaagaaatctttatcactttcaaggtgattcttgcacataatttaaaaaccaaataactacaaagctttaacataaaacagcagattcctgccctaccttcctgaagcctctcccacgtagatttaccccccagatccaaccacttccttatcttcaactcagtggctctattatatccattgaatggcatcatgcagtttgtgtacctgctgcccatcctgtgtttacttaattgagttactgaatggttgattgagagcaatggttctgcaggattagtaaacgctgataaaggcctgttgactatgcatgtatagatgtgtaagttcagagctacattatcagatgtactttgccttgccattttataagcctaatttaactgtgcatttcttttatcataaatggctatgggcgtattaggagtgatgactttattattaaacattaatagatctcccagctcttatcagttattttctgaacctaaaattgaagaagtttgggaattaagccaagaagatctaatgaaattctattgtattttaaaccataattattaagacacagcaggtaacggcctgcccttgataattgtaaagactattgggtgttaagaagaagcacattatgtggatacatgcaacttcttgtagaaatattttcaggcagccctctttttaaaaatggaggatcccttttcagaaatactgattcccaagcatgtgggctggtgtctgtgctgccacaatatacttttaaaaaaattaatagactttattttttagagcagttttacatttgtctgttttttactgctccttgtggagcccggctaactcctaggcagtgcgcccagagctgcagttttagattcagataaattaggcagaaattacagataattgccatctagccatcactgacttcccaccctcaaccagcttattattaacatataattaactcctgtaatgaacatgttacattagtgtggtacatttgttatcactgataagccaatgttgatacattaattaaaatctacagttttcattaggattcactcttggtgtagtacatttcatggattttgacaagtgtataatgacatgtattcaccattacagtcatatagaatagtttcactgccttaaaaatcccccattcttcacatgtttattcctctattcccgaaacctctggcaaccactgatctttttagtgtctccatagttttaccttttccagagtgtcatacggttggaatcacacagtatgtagccttttcagattggcttctttcacttagtaatatgcatttaaggttcctctatgtcctttcatggttgatagcttatttcttttaagcactgaatagtgttctgttgtctggatataaaatggataaatattttatttatccattcacctaatgaaggtcatctcagtagcttccaagttttgtcaattaggaataaagctgctggccaggtgcggtggttcacgtctgtaatcccagcactttgggaggcagaggcaggcggatcacttgcagtcaggagttcgagaccagcctggccaacatggtgaaaccctgtctctattaaaaatacaaaaattagctgtgtgtggtggcgggtgcctgtaatgcccagctactcaggagactgaggcaggagaattttttgaacctgggaggcagaggttacagtgagccaagatcacaccactgtacccctgcctgggtgacagagcgagactctgtcccaagggggaaaaaaaaaagaaagaaagctgctataaacatctatgtgcaggtttttgtgtgtacatacgttttcaactcacttgggtaaaaatcaaggggcacagttgttgggtcatatggtaagggtattgtttagttttataagaaactgcaagactgtcttccagaatggttgggtcattttatgttccccagcaatgaattggagtatctgttgctctgcctctttgccagcatttggtgtagtcagtgttttagatttttcctgtttaataggtatatagtagtagagtatatctcattgttgcttggtttgttcgttttgtttgagacagaatctcgctctgttgcccaggctggaaagcagtggtgcaatctcagctcactgcaacctccgcctcctgagttcaagtgattctcatgcttcaccctctggagtagctgggactataggcaagcgccaccacgcccggctagtttttgtatttttagtagagatggggtttcaccatgttggccaggctggtctccaactcctgacctcaggtgatccgccgaccttggcctcccaaagtgctgggattacagtcatgagccaccacgcagggcccattgttgctttaatttgcaattcccaggtgacatatgatatggagcatcttttcatgtacttatttgccatctgtagctcttctttggtgaggtgtctattcagatctgttgcccattttaaaaatcaggttgtttgttttcttattattgattttaagagttctttgtctatttcagataccattcctttattagatatatattttgcaaagattttattttaatctgtggcttgtctttttattttcttaagaaagtgtctttcacagagcagaagttttagattttaatgaagttcaatttataattttttctttcatggatcattttttctttcatggatcattttttctttcatgatcatggatcattttgatgttgtatgtaaaatgtcatcaccaaacccaaggtcatctagcttttctcctatgttatctcctaggagttttatagttttttgtttttcctttaggtctgtgattcattttgggttgatttttgtaatagatgtaagatccgggtctagattatttatttacatacttatttatttacttacatgtggatatacagttgttccagtaccacttattgaaaaaaatatcctttcagtgttgaattgtctttgctctttttgaaagatcagttgactatatttgtgtggttctatttctgggctgtttattctattcatatgtactgagtctttttgttactttcagtgaagataaaatctatttgtagctaatcttggtttgtctttgactcttagtttcctcatgagaagcagggatccgtagaatagatccttcttactgtttcttccatctttactgcgtgagattagtgagactaagtgagactaagacttagtgagactaagaatacagtcgggatgatgcttttctcatagaaaatctctggatctgtttcaacagctaccagatctgtgtatgtgtctttgtgtctgtctgtgtgtgtacaggcatagtggcagatgtgatttctggttatgtcctttacattttataacaggatattaaacttaacattcatgaatgagtaagaaagcatattttgccccaatctgtaacagaaaatatcaataattgagttattaccagcaattaaaacatcagatttcctggcatgaagctttcataaggggatatttggcaatgtttgaagacatttttggttgtcacaactggtagctgggaggcctggagaggtgctactggcatccagtgggtagaggccaaggatgctgctaagtatcctacaatacacagaactgtcctctagaacaaataattttctggcttgaaatgtcagtagtgctgaggttgacaaaccctgttgtagagaagcagatttatttatatccatggatatgttttcctctttgccttgtcctctagatcaggcatccccaacccctgggccatggactggtactggtctgtggcctgttaggaactgggccacacagcaggaggtgaacagcagttgagcaagcattactgcctgaactctgtctcctgtcagatcagcgccatagtagattctcataggggcgtgaaccccatcgtgaactgcacatgtgagggatctaagttatgtgctccttgtgaaacagtttcatcctgaaaccaccaccccccacctgaccccgctctgtggaaaaattgccttccatgaaaccagtcacggatgctaaaaaggttggggaccactgctctagctaacctagactcctgatgatttgccatctatagctaataagcagcagaagcttatggtgtgatacaacattccacttcttttaggtgtcttgagctgagtttcacttttttgtaatttcataataatttctattatgttacatgcatttagataagctgacaactcttaaagtgggacataaatacactattatatgtatttctgaatatgggtggctggattgttgatcataaaaatctgaatctggaaacaaagttgatgtttaataactctccttggttggctggatatacataattcagactctgctttgaatgtccccttctggtcctttaaatggtctatttccctaccttacgtaagtttccatgagctcatcttgttttcatagtgttcccttttattgttaagagaaacaaaaccaaaaaaccccacttgtttcagcaatgccctgttgtcttcctctgtgtgaaattgctcaactaagagttatgcaaatggggatgcggcacgtggtggaggcttcttgcagcatgttgatgggggaccaagacctggtcttgcctcttcctcctccccctgctggcttcattccggtcataccagctcctgctgtggccatcagctcatcccaggaccttggcagggcctgtttcttttacctcacactgaagccccaaactcttaggctccagtaatcctcccagcttggcctccagtgcactgggattagagatgtgagcccccatgcatggctactctctaagttcttactcccacggacaattagagtttgaaggaccttaggccatgggttcagattatcttattttgcttcaaaattttaaaaacttttttatttttctgtcatatacatatacgtgtgtgtatatatatataagttatatatatataacttgtatatgttactttttatatataataaaatatattatatttttaaataaaatatattatattttaaaatataatatgtaactcgtacatagcacatattatatgtaatgtatcctatacataaccttatgttgtacataaatatgtatattgtttacctattgtactatatgtacatgtataacttgtctatgtattatgtattataataaaatacattgatacttgtatacataatttgtacacaatggaaaacatttttaaaattttagactaaggggaactgagcacaaaacctaagggcctcgaaactctgattttatacatatataaaattatacatatatgtatataaaatataccttttaaataaggtatatatgatgggaaaattaaaaatttgcaagggcaaaaccaaaaatagctgtagatgaacattgcggtagtttagcctatttcttttcagacttttttctattcatttgtaccttttccctcacaaaatgatatcatgctatatatactgtttttacattttttcacttaaatatattgtgaatatctttttatgtcaataaatatatatgtattaaaatttaatagtcacttagtattcttttgtgttgaagtatcatgttctagatcaattttccaaaagccagttaccagaagggcaatttgatgttttctcaaatgttacaccgtaccagaagacttgtttcttttaactacttgaatattatttttatttaaaaaactttatgcatttttaatgtgcttttgctagttcttcaaatgacatatcaacattgtttctgcaattagaaaaaataaaatttaaatttataagcctcaaaaagaaattgtaagtgaccaaatcatttccaacacatatgacatgcttaaactttagtttctgagaaggtgaaattaggatgtgttaacctggcagctgtttgcaaaaccatttgagttgaaaggatagaaccatcctgaaataaggaaaggaagtgttcctgtgcatagggataccagaaagaagcagaagacttgaatctcaaatgtaataaaagatgacattaaggttgaagaattttttaaaaattaaaattctaaaaatgtaaggagaggtaaagcaagaagtgaattaggaaactacagaaacaaccatatctcacattaaacttaagctactaattactagtgacagattaatatagttctaagaagactcaataatccttagctttctaaaaaatagaacatttgtcaaaatcttttaaaacaattatatatatattttttgtttgtttgtttttgtttttttttagatggagcctcactcttttgcccatcctggagtacagtggtgctatcttggctcacagcaacctccacctctcaagttcaagcaattctcctgcctcagctcctgagtagctgggatcacaagcatgcaccaccacgcctggctaatttttgtatttttagtagagacagggtttcgccatgttggccaggctggtctcgaactcctaacctcaggtgatcctcctgcccgggcctcccaaagtgctgggattacaggcatgagccaccacaccaggcctaaaacaattatatttgataagaattattatactcgcatttatataccagggaatactacacagccataaaaaatgaaatcatgtcctgggcagcaacatggatgcagctggaagccattatcctaagtgaattaatgcaggaacagaaaaccaaattgcaggctctcacttatgaatgggagctaggcattgaatacatatggatgtaaagataggagcaatagacacgggagactactaaagtgggggagggagaaggggagacattcaccaaaaaactatttggtactatgctcactacctggatggtgggatcatctgtaccccaaacctcagcatcttgcaacatacccatgtaacaaacctgcacatgtattcctgaacctaaaataaaagttgaaattatttttaaaaaagaattactatactcttaagctatgaaagcaccacaactaataccaactgttataaacttaagctgttaaaactatcccatctaatatgacattacgtaaatctgaaataattaaaagataccaattttggtgaactgatcatcttgtaagttgaaaaccctcacagaactggctttggtgatgtgaattttgagagctgatctgcatttatttaaccagtgacctataatttgacaaacaagcctatttctatatggtattccaaacagtcccacaataagtattctcttgtatagaactttgtgtagcccccagttattttcttataagtaatttattccaagaagtggtcatgttgggttaagaagtgtgtacattctaacggagtttaatatgtactgtcaagttaaagattgtatcacttatcctctcatgccaagcccagtgatttcattttatggtgaggcaattacagtccagagaaaagagtggttttgtcgataattacaggactgtcaaggctggactccacagacaggcttcctgagttcaacactgtctcattatcctctttgcactcccttccaggcagagccacatttccctttcagtttctctgttctagatgccaatcttccatatacctctttaattgtcttgcaattcttttctggaaacattctagtaaatgcagtgattaaaactgtgcccagtgctgctgccccttcacattgtggataactagatgaccctgggtctacctacggctgtgcttatgtcttgtggcaaataataaagaaggagctttggccaggcgcagtggctcacacctgtaatcccagcactttgggaggccaaggcgggcggatcacaaggtcaggagttcgagaccagcctggccaatatggtgaaaccccatctttactaaaagtacaaaaattagccaggcatggtggcgagcgcctgtagtcccagctactcaggaggctgaggcaggagaatcgcttgaacccaggaggcagaggttgcagtgagccgagattgtgccattgcactccagcctgggcgacagagcgagatccgtctcaaaaaaaaagaaggagcttcaaatcaggtaaacacagcaaacagaagataaaaagaagttggcaaacagcttaagtttgccaacagggtttgaatcttttcaaatgtagtctgtcttccatcattactgtttcttcttcttacccgctactcctttgcaatcttgtgtttaggtaggtacagggttgctgctgtgctgtttggtagaaagaagccataggttctctccatattctgtgtatgccgttcaccggcccgctaagatttgactgggcactgctgattcgagggatgttaaatggacacccaccgtgcaagtgcatgcaactgggaaacttgtggatctcctggaaaccttgacaggcagaatgaggggagccctgggacagcatctggctgttttgtcttgacacccctttcctcagtgctcaaccctgcatgagacatgaagagaagagaagagccaactccttattcagacccagagacatccctcctgtgttgaggggggtgcaccctgtaactagctagctagtcttaaacccacttcccacctcacccccctttcccaattgaccctcaatagtcaaagtgaatggaggctggcaggcaccttggacacaggttctatcccagtctttactctttccaacactccttcagacacctctttctcacttctcctaaatcatatcctcctcccttctagggggagcctgatggctcaccttagtcacagacaggagctgacacctaaccatcgaagcagctctgtggtggaggtgatgcccacaccatggacggaagcagctccacgggccatggtcatagcctagaggtgacgcccacaccatggaggcagctctgtgatctgagggattcccggcaccgaaacagcattgccttaattgcccccaaacactgttcctattacacatgacatttaaaccttagggagttacattcataatgttaggttgcctaaagaaaaaaaacaaaaacaaaagcaaactgaaaaagccttaagtagggccttatgttgcaggctggtcagatagagaaagccgtgctatgcagcttggccagcccgggttaccagctcaccaactgtgcccaccctggctgctgggagattttattgaggaaaaatattggagaatgtttgaaaataatgaccatggtatgtaaggcaaaaaatcttagttgtttaaataaagacggtctggctaggtccttttcagttctctctcttttaaaagtgatttaggtgctgggtgcagtggctcacgcctgtaatcccagcactttgggaggccgaggcgggtgtatcacctgagatcaggagttggagaccagcctggccaacatggtgaaaccctgtctgtactaaaaatacaaaaattagccatgcttggtggcggacgcctgtagtccccactacttgctactcaggaggctgaggcaggagaatcgcttgaacccaggaggcagaggttgcagtgagccgagatcgcaccactgcactccagcctgggcaacagagggagactccatccaaaaaaaaaaaaaaaaaaacaggaatttgggaaaattgatgcaagactgaactgcttgagttgggaattaatggagttggtggtggagcttagtgctagtgccctcaccaagtctctccagcactgttgaggctgccaaccaggctattgtgtccccatgtcactttgataagcagtttggagaaagcattcaactcttctgaagactttgtttctctaatctgagtctcctttccgaaagtaaagtaagaaggacaattaaagggtatctaaaggtttctgtgttggtgggcaaagtaaatctcttgagttatagaactgatactggaatgcaagtgtgtagggaacatacttttagggacgaattcctataaatgatgcttgaaccagtcttggacctaatttgaaactcaagatcacttttgtttcagatagacaccacccacctctatttccccaggcttcctttctcttcctcatgtctttctaagctctctaattcagaaaactcatggatctggagcttcctccacagaaaggcagcaagaccttgcatcagtaaagaagtgcagcttttaggctgggcgtggtggctcattcctataatcccagcactttgggaggctcacgtgggaggatcacctgaggtcaggagttcgagaccagcctggccaatatggtgaaaccctgtctctactaaaaacacaaaagttagccaggtgtggtggtgggcacctgtaatcccagctacctgggaggctgaggcagaagaattgcttgggcccgggaggcagagtttgcagtgagcagagatcgcgccattgcactccagcctgggtgacagagtgagactccatctcaaaaaacaaacaaacaaaaaagaagtgcagcttttagatagaaggaatagattctaggttctacagcactgtagggtgactataattaaagacaatgtattgtatattccaaatagccggaagagcaaattttgaatgttcccaacacaaagaaataatacattaaaaataataaaagcaacaaaaaaagaaaaagtacagctttgaagccagaccaagttccggttgtacctgagacctttgattacctagcacaggttcatctctgggttttactttcctcatacacaaagtaccagggacaaagtaggcacatacgtgtttatcccttttctaccccccacgtcttttgtctctgaccctcatagacatttatagctactctgtttgctttaggtgggtgaccagttgatattgcaaagtcaggcaatagacccagcagttgacttcagcaatccaactccatagtccttacttcagaatatgttgtgaattgtatagtgtcttctttaggaatttcaatacaaaatttctatacaggatcttttacctcacaagtggactttagaacctaaccaacaaggtggtggatgtcctcttagatttttttcctgtggacattaaatatatatacatatatatggattgtgtacatatattaggttggtgcaaaagtaattggcaaaaaccgcaattacttttgcaacagcctaatttaaatatgtatatataattttttcaatcagcaattcttgattgtttgattaagaatgtccaaatatacaaatctctctttttaacccactcataatgtgtcactttgttctaacttaaagaactaacccctaatgaggacatctagattgtctctactataagtcatgctagcgggaacatccttatgcccctgtgcagtgtatttaaagaacaaatttcaagaagtggaattccaatgcaagattgcatctttgttgaacagctggataatggtaaggcattgctagattttatgaaaccaaaaccctactgcctctggtaagagtgagttttgttttgttttgttttgtttttttgatggagtcttgctctgtcacccaggctggagtgcagtggcacaacaatcttggcttactgcaacctctgcctcccaggctcaagggattctcctgcctcaggctcctgagaagctgggactacagacgggtgccaccacacccggctaatttttgtgttttttagtagagacagagtttcatcatgttggccaggccagtctcgaacccctgacctcagatgatccacccgcctcggcctcccaaagttctgggattacacttgtgagccaccacacctggccaaggtaagagtgatttttaaaaaccaaaaaattatcccagagtctgggaataaaataaaagagggattaaaatcactcttctaatattctaaggctcttgaatgaggatgagccacccctaatggatattcattccaatgaaagaaagactttatagaaagagaaatctccagcctcacattttctggatgggtcagtgggtgttgctttgtaatcaaaaggctgcctggccgtttgtgtctctttagaccatattgtaaaacttttgcaatgaacagactagagttgtatttgcatgtcaaagcctcagttactatcttgttttaaccaaattctctacgcataaaatatgtctttatttactgttcaaaaaatggttttgaaggcactgctgactacatcatccacagcacttgatataaagtgcattataagcaaacttggaattcctgttggggacacacattcccatcaggaacctggtctgcttcctctctcctgctgtgactcatgacgtccctggcccttcttgccagaaaacctagggcaaatgtgcaggtcagttacagcagacctgttccctacaatgttaccacattcgcatttttctcattgccttggctctggttttctggttttattttattaacttcattattgactcttttgtggtaaaacattttaaagctttttttctctgagaaagaggtagcctataaaaataatctctttgtttggcattgttaataaatagatgaaacatgcatttcaaaatacccattgtatggcaaagtggtaagagcccaggctgtagacttagcttatgacttagacttgagagcgcactcctgtgtgagtgagtcttagcctcacccctcccagctatgctgtgcgcgagtcttttaacctttctgagcctcagttttctcctctgtaaagtcatctggccgtatggtttcttcaaggattaaatgagatgctcaatatattataaatgtgtaatagaagaatactaaggtggaaatcattgtaaagtgtagctcatatcacttggaacatgtaaccactctcagtttttgtcaggagtatattgtattttctacatttctggtactttcatacagcataaggaattgcaagacctgttctgagtttgggttgctcatccccatgtcacatggaggacctctgttgaggtttctggtgggagagtgtctgaatgggggaccccaaacactttgtgagcagagatcagctgtgcctgagcagtgaggccatgctaattctccacgtggctttaattttttcatttacagtgcatacattcgatgttaaattatccatgacaatggtggaaagaaattaagcataaataaatggccatctatcgatcttcctgtcttggatgtcaccaccccacccacatccacctgctttttgtttccgtccttccttttcccaagagaagagagagagagagagagagagagaacgctggagcgagcagcgagggcaggggaactgcaggaacgcagtgggggggggacaggggattccctgtgccctggttgtggcacagctcagtcagggctcggtccgtgctgggagggagctggatcgagcggcccggtgcgctgtgggttggccgcacccatgcagggctcctgccccggagctcgcggcgtgcgcagggtcctcgtgctgctattaacgtatttgcccatttgtaaagcacgattttaagggatggtgagttaaacaccgctttttcggggagggtgacggggcgtgggagggatgagactggtgaaaaaagaactcccatgcttacttagagatcaactctaaacccatggccatttcagaaactttagcgtattaaaaaatgtgctgttttgaatcaaagaagtacttgcttcccctttattttgggaactgcagctcgctagtttcagaaagaggtgtggctgctctttagaggcttcatacctcaagtaatgaaatgataaacaagttgaagttcctagaccaattggaagcctgcaggaaaaaacgcaggcctggacgcgtggcagcgatgccggagagggccgagttcccagaagagctcttgaggtttcttagtacaattcctcccccacgagatattgcctagtcacaccacctctcccccttccccaaactcctgtcatctctccttcctctagacttaactctaagccctaggcaccagatttggcagtgcttcagaattacacatcacatggggagcagcatgctcccactgtgccccagaagagtttcccggacagtgtccagagaatctgttcggtgagaaccaacttctaatgaagtttgtgagattttatttttttattatttattattattatttttttgagacggagtcttgctgtcgcccaggctggagtgcagtggcgcgatctcggctcactgcaccctccccgggccgggttcaagcgattctcctgcctcagcctcccgagtagctgggactacaggcgtgtgccaccacgcccagctaatttttgtatatttagtagagatggggtttcaccatgttggccaggatggtctccatctcttgacctcgtgatccgccttccttggcttcacaaagtgctgggattacaggcctgagccaccgcgcccggctgttttgtttttaatgcatagatttgacccaatactgtaagacaagaactgtgtctgattcaaatgttcaaaatcacctttgcagtccccagagtgcgtgtgtagtgctcagccgtcctgcgttaatggaatcactggatgacagagttcatgtttagatgtgcaccgtgtgttgttctgccctggtcaggcaccagcccccttcttgccatggtggctttcctccactgtcctagcatggcttgcggagaccgtcattttgcttttacctgcgctagtactcctggtttcctgactcaagtagcttactcagtagccctactggatttgatcatctgaatgttttcataagtatcttctctcccataagtgtgtttcctcaattcatttccagtcttgatgaaagccaggccatcttcctaggcccctacctatgtttagctggagccaggttctgcagattctagctcttcatcacctgcccttgaagtctcaaggccccccaccccactccaccttgcacactgcagattggatgtgtcatttgtcttcagggtaaaaaatcaaccactcagcttcacatccagcatgtgcctccctctctggccctgactcctgaccttccctacctgctccttgactgcagtgtttagtgttgtagatagagctcattttctgaagagattaggttgatctagctctctgaaggggccatgttatcttgagctcatggtggttgcatatgaagtttcttcttcctggaatctctttgctgactttgcaaactggctgccatcccgcccatttcaactcacagagcatttcctttaggaagctttccctgaccacctccttttcctcttgcctgagttacatgtcctttcttagatcctgtgggtcctctgtcatcgagtctttacacatctttgccacaagaatacgagcagagttagagctggattttgtctgggtgatggaaaattaatgctcaataaatatttgttgagtgaatcaatggacaggcaaacctatttgggaacagtattcactttgagtttattaatctatatatgataaagaataaaagtatattttttctactcttttttattggagacattttgatggcttgaagcagttctggaatggtaaaacaatgtcattacttttatgtttcaacaggaaatatgggatgtataaaatcaaaagggaaagacagcttgagtgacgatggagtagatttgaagactcaaccagtacgtaatactgaaagaactatttatgtgagagatccaacgtccaataaacagcaaaggccagtaagtagatagtctcaggggagaattcccacagcaagatcaaagcatggctacataatttaaacaccagtctgtaatatgtgcatgcaaaaaaattccattgattacttggtcctcaaataatttttgatatgctttgtaactttatcctttgaagaatgtataaatattttagggataactaggccactcattgtgcaattaaaagggcctttggtcacattcttttgtgtgaagaaagccatctttcatattactggtgcaaagaccccactatatatatatacacacacatatatatgtgtgtgtgtatatatgtgtatatatgtatatatatgtgtatatatatatgtgtatatatatgtgtatatatatgtgtatatatatgtgtatatatatatgtgtatatatgtgtatatatatgtgtgtatatatatatatgtgtgtgtgtgtatatatatatatatacacacatacatacataggcttgtgtgactcaagatagtagtgagaggctgggcgcggtggctcacgcttgtaatcccagcactttgggaggctgaggtgggcagatcactaggtcaggagctcgagaccagcctggccaacatagtgaaaccccatctctactaaaaatacaaaaattagctgggcacagtggcgggcgcctgtaatcccagctactcaggaggctgaggcaggagaatcgcttgaacctgggaagcagaggttgcagtgagccaagattgcaccactgccctccagcctgggtgacagaacaagactctgtctcaaaaaaaaaaaaaaaaaaagatgtagtgagattagctcagtggtttagaagcaaaaggaaatgtgggatgcaagtcagaaactaaaataggtgctaatgtgtcttttgttgtatcatactttatcctgtcctgtcatttcttcaattaattcaaaatagtacagatcctgaagttgtcatctgttattttagtgaattaaaatattaaggaaaaacacctctaattctgtcccctaaccttagagaaatagctggactagaaatattttatgagtgatgtgctatttggtgtatttcggaaatacttggcaaagaaagaactaacatcacattttatggaaaggaagaacagagctttgaacaattataacctgaaatctacttcatttccgagcttatatcctttgcatatatgtattctctcactgtatacatgtataccacccatagcctgctttctatggaattctgcagcatttaagctggaaacagtttattccagattagcccaaatcccattattaagaattttcaggctgggcatggtggttcatgcctgtactttgggaggtcacaaggtcaggagtttgagaccagcctggccaacatggtgaaacctcagctctactaaaagtacaaaaattagccgggtgtggtggtgcgtgcctgtagtcccagctacttgggaggctgaggaagaagaattgcttgaacccagagggtggaggttgcagtgagccgagattgcgctactgcactccagcctgggtgacagagcgagactctgtctcaaaaaaaaaaaaaaaaaaaggcatttttatagtttctctagtctgacatgtttttaaatgctcaggtgttttagaaatatattcccattatcaaacctttctgcctgccctcccctcaatatgtccccattaccctgaaggtaggaaatatctgccatgtatcaaagtcacatgtcatcattgagacaaagaaatcaacatcggtcttcttaagaagtggagataggccaggcacggtggctcatgcctgtaatcccagcactttgggaggccgaggcaggtgcatcacctgaggtcaggagttcaagaccagcctggccaacatggtgaaaccccatctctactaaaaatacaaaaattagctgggcatggtggcacatgcctgtaatcccagctacttgggaggctgaggcaggagaattgtttgaaccaggacccgggagggagaggttgcagtgagccgagatcacgccactgcactccagcctgggttacagagcgagagtctccaaaaaaaaaggaagtggagataaagagtggatatatcatgctattaagttatcatacatgatgtttcttgataaattaacattgtaattttatatatagaaaatatatgtacttaaaatgtataggaatattaatagatttaattgtgtgattataaatataaaatttaaaaacctattacaggcagtgaaagaaacattacataagtatgtacagatatagaaccatatcatatataaatatgattaatagaaaataaaataagagaaattagagtcacaaatagttttcttatagacatcagagttctcaaaaaaagatctgatttttctcataccatatgctatagattttgtaggttttaaaacacaagttttttcgttttgcacttatttattcatttatttattttgaggtggagatttgctcttgttgcccaggctggagtgcaatggcaccatctcagctcactgcaacctcctcctcctgagttcaagcgattctcctgcctcagcctcccgagtacctgggattacaggcatgcaccaccatgcctggctaatttttgtatttttagtagagatggggttttgccatgttggccaggcttgtcttgaactccttacctcaggtgattcacccacctcggcctctcaaagtgttgggaatacaggcgtgagccaccacacccagcctgttttttgtttttaaatgatgaataaagatgtcctttattcagaaaagtcaaggagaatagtgtgcaaacccacacaccgctttttcctcttgttcaaaataaaggggattaaaaatcaagttagaaagcagaagtagtaaacacgcttgaagtctttcaattccctcctgtataccattttttgccccttctgtggtcacagatgccctccactcatgagccagttagcctggccttattccatggccataaccaacactctcagccctggccagatatgacaaaatgcacgctatggattgattaaaaggggaatttgatgagaaggtgaggtagggttgatgcaaattcaacaacattctagaaaaagccattttaaggaaaaatctagagcaatagtatatgtgtggcatacatgtgtttcggtcttataaaaagcatattaaaatgtttgtaagttaagggctttttgaaatttgaaaaatcagcttgctgcttttaaaatgatgtaattagtttctagtcttctagttatttcctctaaatcacataaaatagatcatatatccaaattatgcaaatctgaatgactaaaaaatcaacataaaacttcctgacataaacatttgaaggatagtatgcagccatgggtttttctggtactacaatgtagtaattttccctgtctcactgaaatggagattttatgggctttcatcagaaatttaaatttcagtacaaactgttttggtcccattctgtgaagccactttaatcaaagagagacagaaaagttacatgacttgtggtataggcctctgacagcatctatcttacaagaggcccagaggcctcacacagcctcatgtggcactgtgaagaaaagaatttgattttaaaggtaattgaggtggtcttctgtgccaccaaatccttcccaataactcacccccccactgaaataacaggggatgccatctgtccctgtgatggagtcagggtcagcccaagaaaacctggatgggatgggacttgctctcagcctccagggacagagccctgaccatgcaattttatacaattggggaagcctcagatgggcagtcccaggctgggacggcaactccacgaaatcaccagggtcccacctcttccgtctccatcctgctgccgctggtgtttgctttctatgtgaagactccagccttcacttgtttctagggagagagaaagaggcaagggaaaaggggagctgacagcaaagccctgcacaaccgatctgcggaccaaaactccctctgccctctgcccggggctagagagtttggaagcacactcattgagctgggcaaactgccaccccaaataatattagggctctgtcaccaaagaagaggaggagctaggatgaggtgagcacctggcacctgcccagaacctcgctcccttcctgccacccacagcaagtgataaagagccctgtcactggccaagcagggcaggatgcacctctacaggtttttccctctgtgctcctgttctttctgacttaataaatgagcccatcctaacatctgctactgttacaaaaatcatatatacaacacgaatgtgagtaagaaaagctaaacagaatttttttttctaacaaatattctctcgtaggttccagaatctcagcttttacctggacagaggtttcaaactaaaggtatgttttcatagcaacatagttaaaattttttttctttactattagagcttctataaagtgattgtcctaaatgtttttatttttttttattgtgggacatatataacataaaaatttaccctcttaactatttttaagtatacatttcagcagcattaggtacattcacattgttgtacaaccaataccgccctccatctccagaatgcatcttctcaaactccatacccattaaacaataagtccccattgcctcctcccccagccgctggcaacctccgctctttctgtctttatgaatttcactactctaggtacctcctagaagtggaatcatacagtaattgtccttttgtgtttggattatttcacttagcctgatgtcctcaaggttcatccatgctgtagaaagtgttagaatttatttccttctaatagtgaataatatttccttgtaagtatatgccctggccgggtgcagtggctcacacctgtaatcccagcactttgggaggccaagttaggtagatcacctgtggtcaggagttcgagaccagcctggtcaacatggtgaaaccccgtctctactaaaaacacaaaaaattagccaggcgtggtggtgggcgcctgtaatcccagctactggggaggctgaggcaggagaatagcttgaacccaggaggtggaggttgcagtgagccgagattgcactattgcactccagtctgggcgacaagagcgagactccgtctcaaaagagaaaaaccaaaatgctacatgatgtttatccattcctccatcaatagatgtttgcattatttccacatcttggctattttgaataatcctgctgtgaacatgggtgtataatttcttaaatatagagttgtatttatagttttagttttaagtgatttgcaagaacaaatactggacacagtgtatacagcaaggtactctctgtgggccgtgcagaccctgagcccactaggcaggaagcacatgtccttcttccagttgccccctcttagtgcttcctctcatcctttgtgccccatgaggtttgttaaaacgcttctgctgatggattcttacaggtgttctcttgtgttcatctttagatccagaggaacaaggagacattgtggtagccttgtacccctatgatggcatccacccggacgacttgtctttcaagaaaggagagaagatgaaagtcctggaggagtaagtgctctcaagcacgccacggctgctcgtttcctcaggccactgagtcctgcaggctgtccccttgtcttgcttctggtgctacagccatagcccggcccctttcttgtaatgggtatgaggcctccttgctacccacagggagtgggcagtggaaggaatagagccaaagggattttccttttaagtcggtctgtgagcacacttcagggggtttccctttgaagacagacagtggtttttctttaaaacaatttttttttttgagatgggatctctctctgtcatccaggctagaatgcagtggcatgatcatagctcactgcagccttgaactcctaggctaaagcaatcctctcacctcagcctcctgagaagctaggactacaggcatgtgccaccaggcctggctaatttttaaaatttttgtagagatgggatcttgttatgttgcccaggctggtcttgaactcctgctgtcaagcaattctcctgccttggcctcccaaagtgctgggattacaggtgtgagccaccacacccagcctggtttctttctttatccactcttgccaccttaagaaatttgggtctgtgtggcccatgcatgatacttgaaatgtcacttttcttttgttatattactcatgtttagactgggttcatgggcccagcctagcttgagttctaagggtactgagctacagcagctgtgttgggaaattctcaactcagcagctgccatgcttttgtgaggacgcctgagtgtcgtcatctcctcaaccccctcttgctgactcagacatgtggcagtgtcagaccataggcatgcaggacagtgctcagaataagaaactccagttgctttaattctagcttgcttttcttactaatcttgcattaaatgtcactgtgacctgccaaatagggtttgagggggagactcccttattaaggacaaggtgttccgtggttgagagcaatgttgcatatgggttgaacagggacttaagcctgatcctggccctgccacttgatagctgtatgaccttgacaagacccttaaactttataccttggtttctttacttataaaatgggaatgacagtacctagatcatggggttgatgtgagcatgatgcatgtgtttaaacatgacataagcaaagaggatgcagagcttagtattagttctagttgccttcatgccttacagacaaggatcctgtctgtgtgtggaatttatagaggaatgcagttaaggctcaaagggacccattccttcccccattaccagcttacctgcttgcttcttccagtgctcatccctgcctcctccctggctccatgcctgcctttctgctgaggactcgagcatggtgctgaagctcacttgcttggaattgtcttatggttttcttcttttcatagtgtccatctctatgataactagatgtttgaacaaaggagtttataatgcatgaactgtggaccagtattcccttgactctcatttctataaggatttgaaagcatttcttagctatcctggggcaagttacaaaccttttgtttctgtgagatgggagccatttgtaccaactcttctttgtgcacccctgatcgcagtgatgcgtgctttagttgtaaggctgttttcctttgcttctgtctctaaacatattttaattccatcacggagagtgaattttcccactggattctggggttccagagatgttctccacccgccttcaccatcctaaacaaacatcttgagacaattgctattgtagctgttgagtcttggatataaacacttttttccttttatttttagttgacatggaataattatatgcagtcatgggatacagagcgatattttgatacatgtatgcagtgtgtacggatcaagtcagcgtaattagcatatccatcatctggaacatttattctttctttgtgttgtgaacattcaaaaccctcactcctggcttcttttctttgtctctctctctctctttttaatagctttattgagaattcacaataccatacaatccatctacttaaagtgtacaattcagtgatttttttagtatagtcacagaattgtgcaatcatcaccacaatccattttagaacattttaaataccccaaaaggaaaccctgcaccccttagctgtcacctcaactctcccattctctgcagccctaggaaaccacgaatctactttttatctctgaagactgacctattctggatatttcacataaatggaatcatacaatatgtggtcctttttgactgccttcttttatttagcataatgttttcaaagttcatccctgttgtagcatctctcagcactccattcctttcactgctgagtaatactccactggatggatattccagattttgtccattcatcagttgataggcattttggttgtttctactttttgcttttacaaataaggatgctttgaacattcatgtacaagtttttgtgtggacattatggtttcatctttcttgggtatatgtcaaggagtatagttgctgggtcctgtggtaagtctatgttttctttatttttaattttttaattgatatgtaatatctgtacataaatacatatttatgggatatctgtgatattttgatacatgcatggagtatgtaatcttttagcttctttttgatgtgtatttctattctaggcatggagaatggtggaaagcaaagtcccttttaacaaaaaaagaaggcttcatccccagcaactatgtggccaaactcaacaccttagaaacagaagagtgagtcctcatgtgttgtcatcttggtggctttatttgccacattggatttcttgttaatattcttcacctttttcttgccgtggaacataatatgcaggaaatgttgaaatgtcttcacaggtggtttttcaaggatataaccaggaaggacgcagaaaggcagcttttggcaccaggaaatagcgctggagctttccttattagagaaagtgaaacattaaaaggtaggaaattgttcaaagcctcttttaaaacactatttaggaaattatttttagaaactattctagagctactcaaggggaaaaaagggcatatagtatgctctggtagtaaaagttttatggtttgataacaaataacaaacctcagtgattagttgtgctactaaaagtaatatagttgagtgtggtggctcacacctgtaatcctaacactttgggaggctgaggcgagaggatcacttgagtccagcagttagagaccagcctgggcaacacagcaagaccccatctctacaagaaatacaaaacttagccaggcctggcagcacatgcctatagtcccagctactctggaggctgaggtaggaagatcacctgaacccagggaagggaggctgcagtgagccgtgatcacgccactgcactctaactagcctgagtgacagagtgaggcactgtctcaaaaaaaaaagagaaaagaaaagaaaagtactgtagaaagcacacatgattgtggccagttcttaccaggctttgtttgctgagccttttgcattattatttgaataaatcctgaagttttaagacaaagaaaattaggctgggcgtggtggctcaggcctgtaatcccaatgctttgggaggccgagactgagaatcacttgaacccagcagtttgataccagcctgggcaacatagcaagagcctgtttctataagaaattaaaaaattagccagctgtggtggtgcatgatcgtagtctcagctacttgagaggttggggtagaaagatcgtttgagcccaagaggtggaggctgcagttagctatgattgtgccactctactctagcctgggtgacagagcaacaacctatttcaaaaaaaaaaaaaagaaaatcaaagtaacttaaaaaaatttaaatgtagctaaataataattttaaaaaaattatcatgaagaaagaaaatggtatgttggcaagctacacagcaaacaaaatgccagcttcatttgtcaagtagaatttttataggacttttaaaattatgcattttatacaaatttcataaatatatgtattttgcatatttgtatcacaaaatgtgtactgcagttgttgtataatgcagatcttatttgtgagatataaacatttacttacacttttccccccataggaagcttctctctgtctgtcagagactttgaccctgtgcatggtgatgttattaagcactacaaaattagaagtctggataatgggggctattacatctctccacgaatcacttttccctgtatcagcgacatgattaaacattaccaaagtaagtaaaaactgaaggttcaacaagacaagatatatttgttatgatatgtataagacgtcaaacgctatttttatattaaaactttttatgcatcgtatttctcttagatacagttgcaggtcatattctataagtggttctaaattaatctatagttaggccaggcacagtggctcacgcctgtaatcccagcactttgggaggccaaggcaggtggatcacttgaggtcaggagttcgagaccagcctggccaacctggtgataccccatctctactagaaaaaaaaaaaattagccaggcatagtggtgcgtgcctgtagtcccagctactcgggaggctgaggcaggagaatcacttgaacacaggaggcggagattgcagtgagctgagatcgcgccactgcactccagcctgggtgacagagcaagactctgtctcaaaaaacaaatactaaaataaaagcaattaattaatctacagttaaatacacaaagtaagatttgatccttgtgaataattctcccagtccttcccacctagtacatgctgtttgacattcagtgttccacaattaccaagagaaaaatatatattgtctttgcatatatttttacaatgcatctgaatatctggaataggaatgcagatttgcagatctgtgtttgtgtgtgtgtgtgtaaaagtaatgtatattcttggtaaagtcaaacggatataacactaccactgaaatatttagaagtggcaggtcaatgtccctgtctccagtgccactttgcagtcctgagaagcctgggcctgagactctgggtccctttcctgtgtaattggagtcagttgagtggttgttgccccggctcctttctatgacctgctcgaaggggatgcacattataggtttgcttgagtcccaaaacacggagagagcaacgtgcttccgattttgtagattcttgccttcctccgccctcccattcctgtgtgcatccggcacatgctgagggcttgtggtactctggctgtgttctggggcctggggtccagtggtgacatgaccgagtccccactatggtgccctgtgaagcttaatgtgggattagtaatctgaaaccacattttattaagtgtgacaatctggcagcctgtggttgtctgttggctttgttgtttttgttcatgtatgttagcagtgctgaagaatacaatcaagtatgttttaaatggtttttcttatataaatttcaggccgggcttggtggctcacacctgtaatccagcattttgggaggccgaggcgggtggatcacttgaggtcaggagtttgtgaccagcctggccaacgtagtaaaattctgtctctactaaaaaatataaaaactagctgggcatagtggtgggcacctgtaatcccagttactttggaggctgaggcagaagaatttcttgaacccaggaggcggaggttgcagtgagccaagatcgcccattgcactccagcctgggcaataggagtgaaacttcatctcaaaaaaaagaaaaacaaaaaaaacccacaaatttcaaaagtcacaattatgtcaaggatgcattttagttcacagactgcggcaggttggacactataaggctagtgttcaacttttctttatagacacaggtaaagtacaaagtattgcatttcttaaccttcatttttccctttcaaattagagcaggcagatggcttgtgcagaagattggagaaggcttgtattagtcccaagccacagaagccatgggataaagatgcctgggagatcccccgggagtccatcaagttggtgaaaaggcttggcgctgggcagtttggggaagtctggatgggtaagtgtgcggctcggggatctatgtccttctagagatggtgacaggagaagtaaaggctcaagccaatttcgatcagcttctgagccagacactaaattatgtcagaagcatcatttattttgttttcctctgtccattggggctgagaactggcctgcaaaatctatttacttcagctcttgctctttcttgcgacttagtaattctcttaatgtttgtaaggaggggagtaatgggtatttatcttgatcatctgcctatttcttcatgattccctcatcgccagattctctggatgcacggctcaagtgcaagaaatttgcttccatctctgggaaaggttatcttagggctggaacccattggcttaatagaaagcctcaatgtattacaatttgagggtcaccaagaaagtttctaaggttctcaaagtcacgtcatgaagaaatcatttcttaacattaagtattgccttctcaggctggcaagaagtgcagcaagattatagcagtggctttttccaggggattcttttcatctacctactttaaaaaaaagtttttatagtgagctgagcacagtggctcatacctgtaatcccagcactttgggaggctgaagcaggaagattgcttgatcctaggaggctgagaacagcctgagcaacatagcagaccctgtctctacaaataaagaaattagccaggtgccatggtatgtgcctgtagttccagctacttgggaggctgaggtgggaggatcacttaagccaaggaggtcgaggctgcagtgggccgagatggcactcctgcactccagcctgggtgacacagtgagaccctgcctcaaaataaataaataaataaataaataaataaataaataaaagttttcatagtgaatgtgaacttctttggtgataagagttttttagaacaaaaatgctaaagcataacattcttttaatggttctaatggaatgtgcggttatttctggaaagagtaacatgttaggtcacacacatctgactgggtcactttttctgtgtcagctttgttgagtgaaagcaaatgtgatttctaaatggaaggggcagatggcttttaaacactctccagccccggcagaacagaagctgcagccacgtggacacgtcacctctgcatccaggttttccctctacagtcttggcccctgggatcatagccttgctcactttctcctgttggcccctcttgagcagaagtgacttttaaacacggcacatactgagccagcctatcattaattaattcttactgcactgtaagtctttctgcacatatttgcagaattcaggtaaactgtaattacatgacttcacattctccgtgtggatcggcatgtgtcagaactggctggcagtgcaaatcaggtcctcagtttctgttccactcagcagattcatgggtgtgagtgctcactctgaatgttgtctcttcccatgcacactctgttgtcttcctcctcatttctctgtgtgctctttttttaattaacatgaaattcacctgacataaattaatcatttaaaaggaacaatccactggcatttagtacattcacaatattgtgtagccaccacctccatctactttcaaaatgtttttatcatcccgaaaggaaacaatgtacccaataaacaatcactcttcattcgccccaccctcagcccctggcaaccaccattctttctgtctctatgaatttaaccactctaggtacctcatataagtggaatcatttatttgcccttttgtgtctggcttatttcacctagcataatgttttcaaggttcatccatgttgtagaatgtattagaattttcttgttttatggctgagtaatattccattgcatgactataacagagtttgtttatctacttatccattggtggacctttcagttgtttttaccttttgactgttatgaataatgctgtatgaatgttcacatacaaattattatgtggacacattttcatttctcttgtgtataaacctaggagttcagttgctggggcatgtgataagcctctgttgaactttttcaagaaccacaaaactattatatgctcattaaaaaaagaatgacttggcttcttttttcctcctttgatgtttatatttatttttttccaaatctacagaatggggcaggaatagtataatgaatattgtatacccttcacatagattcaccagttgttaatattgtcctaattttcttgttcttttatatacgtacacatacatacatgttattattgccgttgaccacctgagattaagtgcagacgtgacttgctgagttttgtgaagagtgtttaagcacctaagcagtactgtgttctcagggcacctgtcaggaggcatagtattagccggtcctattcttaatgatgttctatttgattttatctacagtaatccaccatcacttttatttaaagtgatccaaaagtttaaatggatcatttaaatttagtttctccgtggcaactttttactcccttttgtagtaaataaatactctgtgggaagtttaagattatgtaaatagaactttctccaaatggtttcagcacgatctgtgaattctcttccctcttagaagccgtcacttctctataaagctccagtcctttctgtcctcctcccttgctccttgaacatgtctattccaaccccactggctcacgtcaagatccagggacttctgcgttctcttcccggcttctccgtctgttcactgagagtattggcaggaaaaccaggatcgcaatcacacttaattgtgctcttagtccatctgagtacttactgtgactttgtgtggggagaaggaggagaagacaggaggaagggagaaaagagtgtacaggctctacgggccctgctctaagtgtgtttgcattgacattctcacttactcattgctgtagcactgtgaatgagaggcattactgtgatcattcgataaacaacatcactgagaatcagataagcaacttactcaaggtcattcaaggcagtgagagagccaggctgctctggcatctgggaaccctggactcaattatttgctacactatttctaagctaatttgacttccctagcctcagtttccacatcagtgaagtggacaaactccaatcttcagttgttcaaaggaagaatgagattatgcacctgggatgtttcccagagtctgactccgtgtgccctatttttattattgtcacttttttgttttttattctagttattggaagctatattttggtgtattttccccaattttaatcataaaacagagccataaataatccaattagactttcctatggatatttgctggcaaaggaattaacgtgtctgtcatgaaaagaaatgtagagggaggttaatcaggatgtactggttcatcctaaatcagtagccctgcatataaagtcatggcttggaatcttgttctagcctctcctgttcagctgtgaagccaggataaagcatcaaattgcatgctatttgctcctgagagacaagtaaagtgaacaaagtaattcaaatccaactgcttgagtgaattatttcttagtaacactgtttttaaagatgcagttgttggcagggcacggtggctcacacctgtaatcctggcacttcgggaggccgaggcaggtagatcacttgagctcagaagttcaagactagtctggacaacatggtgaaaccctgtctctatcaaaaatacaaaaaaaaattagttgagcatggtggtgttgcacctgtgtttccatctacttaggaggttgaggtgggaggatcgcttgagcctaggaggcagaggttgcagtgagctgagattgcgccgctgtcaccaaactgggtgacagagtgagaccccatctcaaaaaataaataaataaatatgcagttgctgccagcctggatgcctggcatcaaaagtgctgctgtcagctgtggtgtcagtgcgtcctgcagggggtgcctggcgaggttgggagcaggaagtcaggagctaggcagcctggagcacacacctcagcagacctgcttacaccccctgttctgtcgtaaggtgtaagtctgcactaaaattgtacacctggagcttaagaacattggtcctttctgggattgggaaaaccgccttgcttctaattccagatacactgaatcctccaatttctcttctttcctgcacacagcttaattttagagaacttttgcttaacatatattcaggtggtgcctaggagaaacaagtttagaagagaagagaatggagtgttggaaagtatctgattgttttatacaaatttttactttttatttagactgaaacaggataaaaatcttgagaaaatacatcacttgaatagatttgctcattccgtttttaaaaattgtggttaaatacacgtgacataaaatttgtgttttagcgatgtttaggtgtacagttcagtagtgttaaatgcatctacactgttatgcaaccaatctccagactctcttttcatctgataaaactgagagactgtgtactctttaacaccaactccctgatcccctctctggcaaccaccatgctactttctgtctctatgaatttgactaccttaggtacctcaaataattagaatcatacagtatttgtctttttgtctctggcttacttcacttagcatgatgtctccaaggtttatctatgtcgtagcatgtgtcagaatttctttgctttttaaggcttaatgatattcctttatatgcatacataaccttttgtttattcatctattgatggacaattaggttgtttctaccttttggctattgtgaatttgccactgtgaacatgggtgcacagatacctctctgagaccttattttccattcctttgagtataaatccagaagtggaatggctggatcctgtaattcttctatctctaaaatttggaggaactgccgtactgttttctacttcggctgcaccattttacattcccattgaccgtgtgtaagtgttccctttctccacagcctcaccaacagttgttattttctgttttggggattttttttgttgttggctggttggcttttgtgatagttgtcattttaatagatgtgagatggtatcttactgtggttttgatttgtgttttcctaataattagtgaccaagcatcttttcatgtccttcctggtcatttctacatcttctttggagaaacgtatgttcaagtccctttctcactttttaaattgtgttctttacttgatttactaataacgttttaaatgacagaggcagtagagcctcatctaaaatggggtttaatggaacctatctcagagggattacataacaattgaaagaaattgtgcaggtaagttcaattgacagcattcaaagcactgttattaaataatatctttagtaagaaaatatgtcacattagtgcaaaggctatacagcagaggaaagaaattgcccagggtttcccactaaatagaagttgtttgtatttttgctttttaattttttttattttgagataattgtggatttacatgccattgtgagaaataatacaaaaaggataacatatgtccacgcaaaaacctgtacatgagtgttcatagtagcattatttgtaatagccaaaaagtacaaacaactgaaatgtccatcagatgatgaatgggtcaataaaatgtggtgtattcatacaatggagtatttggcaataaaaaaaaaaaatgacctggcatacttcaacatggatgccatgctgttttatggatgacttataataacactatgttaagtgaaagaaatcaggcccaaaggagcacatattatactgttccatttatatgaaatgtccagaataggcaaatctagagttagaaagtagatgactggttgcctagggctggggggcctgggagtatggtaggagtgactgctaatgagcatgggatttctttttggagtcatgacaacattctaaagctaattgtggtgatgattgtacaattctgaatatgcaaataactgatgaactatatactttaaatgggtaaatgacatggtatatgaattatatttcaataaagctggcaaatatataaaagaaatgatacagagagatcccatgtaccatttacccagtttcctccagtggtaacatcttgtaaaactatagtacaacatcactaccaggatattggcattgatcaccgttcattttttaattgtgcttttcttccagtcttatattgaatggaggaaggaaggaaaagaagggaaggggaggaaaagaaaatagaagagaaaaaaatagaaaattttgacttgggatcttttgcttgtagggactgagtttgcctgtcagtcagcgagctccttcttcactcctgaaataatttaaatatgttgaatacacatagcagaggaatattgggaatacaaccaaaagagttgtgattggtgattttatgttacaaatagactgaaggatactccctctcccaattttgagctgctagaatttagttttctcttaccctttttagtttctcaaaggataagcaggccagcttttctcattgatagaaaaaatacaattaaaattctatcactgttaacccagtaagttaatatttttgttaaacataaggaattgttcatggacaacccatttcattttatggtctgcatttttttggcttgaaatgcagtgaacaaatactaggaagtgacctgttctttgggggaaggggctgggtggggataaaagaaagaggtgtctctgcttcaagctgtttcctcttgtttgtgtgatccttgtgacatctgacttgggtgacatgcttcctctgtggattgtcctattcccagggaatcaactgggcagtgaggctaaggacgatgtttcctctgactgcttggtctatgaagagaccctgaggaaggaaggaaacttattttacattgaattttgcttgataaattctcatttgagccaactgccttgagattaatcaccaacccacttccaaaatcaactgcatgcattttttaaaaaccactctcccttttgtggtacgtgggcactttttagcaagccagtcacagccggaattagagtgctctcaaggtgccacatcagctttctttaactgtggcaaagtgtcactccacaagacgctttttactagctcaaaaagttttttttaacataatttttcatctgtattgacaacccaaatctccatgactaggttaatttgaaccttcaaactaccagagagtatcttagaaacctatgatttgatccttagcactgaataaaaatcatgcctttaacagagggatgaaaaccaccctattgtttcaatatcacagccctaagagatcatctgggagctgccgccattcttgggccatgtttgacacagctgctttatctaccactcacctcaaactccttatcagtatttaaaatatatgcagctgcaatatttcctgatgacttcccccctaaccttggaaagcgttttttttccttcgtcctttactcatacttttctatttataagtctccatgagcttcattgtttttatgatggcaaaagggaaatggttttgtttctttaacttttattgctatgtaatgtaacaagcagacagaaaatgcaaacacaaatatctaatttcacaaataattacaaagcaaaaactggtgtgtcgacctctgagaggaaacttgctagccccagaagcccccaccgtccacccatcccctcccacccacaccctacctgtcccccagagacaacagctattccgaccttcctgatggttttctgacttcttcttaattttgccacttttgtatatggggatgtatgcatccccccaaaatatagctcagttttgctgtttttgtactttgtatgaacgaattataccaaatgtgctcttttacgtcttgcctcttttactcaacgggttggtgagaggcatccatgcttttgggtgtggctacagttcattcatcttcattccatgtggtgttggtaagatacatgtggcttttgggtatggctacaattcattcatcttcattccatatggtgttggtgaaatgcatccatgcttttgggtgtggctacggttcattcatcttcatcctatgttgtgttggtgagatgcatccatgcttttgggtgtggctattgtttattcatcttcatgccatatggtgttggtgagatgcatctgtgcttttgcgtgtggctacaattcattcatcttcagtccctatgatgttggtgagatgcatccgtgcttttgggtgtgactacagttcattcatcttcatctcatgtcgtgtttgtgagatgcactcgtgcttctgggtgtggctatggttcattcgtcttcatcccatgtcgtgttggtgagatgcatctgtggctacggttcattcatcttcattccatatggtattggtgagatgcattcatgcttttgggtgtggctatggtttattcatcttcatgccatattgtgctgtgctgcatgtgttttcaagatatacgatcatttatccatttatttcaccatttactgatgaaattggagttcatgttagtccattttgctttgctaaaggaatacccgagactgggtaacttataaagaaaatgtttatttgctttacggttcttcagattttataagaagcatggcacctgtctctgcttctggtgaagcctcaggaagcttccattcaaaaaggaaggcaaaagggagtgagcatgtcacacagtgagagcaagagagtgaccagaagaggtgccatgcttttagacaaccagctctcttgtgaactaatagagcgagaactcactctttaccacggggatggccccaagccattcatgagggattcattcccatgacccaaatacctccctctagtccccacctccaacactggggatcaaatttcaacatgagatttggagaggacaaacatccaaactatatcagagtttttcccagtttgggctgctatgaacaatgcgctgcacatttttgtgcctcatttttgtgctgatgcaagcatgcatgagctctagggtgagtgggagtggatttgctggatcgtaaggtgtatgaatcttcagctcttctaagttattgccaacttattttgcaaagtgctggtcccagcttaagattctcaccagcaatatgccagtccccacgtcccctttcctgactagcagagctgtacttagagagatgtgggccccaaggcagcacaggcagtgggtggttatccggaaggaagtgtgcactcagcatccttcatggacaccttggatgttgtcacagaagctctgcaattgaatttcagtgatgctcagcaaagaacacagaatgaggcctagggcagctgctccagagtccctcccaaggggcaggtgctcatcagcacttgatattaccagactttaaaaatttttgctgagctcggcagtggtttctcatgactttatttgcatttctctggttgctaataagattgagtacttttcacgtgtttattactcatatgaatttcttcttttgaaatgcccttccaagtctttgcctatttcttctgatttttcttattgatttgtaagaattctttctatatcctggatgcaagttccttgcagttatatgtatcatatagtttatgtattttcatctattttatatcatgtattttcctgctgtgatttgctatggatatgctcatgtaacttagggttagagttagggctggggttaaggttagggtttataaacgttaaaaaatttataataaaacctttttgatttaaatgtaatattaaaaggcttttgttggtggaatgtactttacaataactcttaagatctacagaaaaggccatattgcttgtaattatgcatttagatgtcagaacaatttaatatattcataattccattattttaggtaggtggtagctttttaaaaggacctaggatggtttttttttgtcagctttatgttactatcttctccatatgttctaacacttatcttgtactgcatttttctttttcttttctttttttgttttgttttagagaagggggtctcactatattgcccaggttagtcttgaactcctgggctcaagcgatcctcctgcctctcaaagtgctgggattacaggcatgaaccaccttgtctagcctcatttttctatagagcactgcaagctcctaagtattaaccaaagtggaatacaaaataaaacattttaatagaggaatcagtcttaatgaccaaaagaaacatcattggataggttgactgctagctataaataaactttttattatttgtttgaaggcttggaaatagatgtataatacatttctttattatttaaaaaaatcattttttaaaaagtacatacttggctgggcacagtggctcatgcctacaatcccagcactttggaagaccaaggtgagcagatcagctgaggtcaggagttcaagaccagcctggccaacatggcaaaaccctgtctctcctggaaaaaagaaagagaagagaagagaaaagaaaagagtacatactcattgacaaatccaatcagaatagaaaagaacaagagaaagtagaagtcactccaaattctaccagccagggataatcactgttgttttactcagcaggcttccagtcatctttctatgctattcacatacagatactcttgcaccctaaaaaggggaccgtccactccacgtcacctttccttaggtggatagggcaggtgctatccagcttttgcgcaccaggcagcaggaactgcaggaagatttgcagtgacaccagcagctattactcccttctccccattttttttttaacatttccaagagaaagatggaagcagaagagaggacaggaaggaagagtatgattattaatatttctgctttgccaaattactgagaaaaggctttcccaagagaaagtcaggattaaagtgctcaatcccagtcccagaagggtggtgcctcgggggaactatactaaggagtcagtattgcccagagcgtgttccatgcggtgtaagaggctacttgaacaagtgttctgaggtcaagaaattgtgggaaacgctggggtgaacaaatgcaggcttttcccctgaaggcctcccagggcacctgctgcatctcctgggtgggggaggagtggagggagtggctccctgtccttttagtgggggatcctttttcactaacagtcacccaagtccagttgtctgcaaattttgggaagtgcttgtttgactctagcatattgtactttaaagttagtatatataagtaatttttataaagaacaccttttttaaagaaaatgtggtaaatagttaaagatatggtgaacaaaattaaaatcgctcgtaatcacaccattggaaataaccagcatttgatatattttggtgtcttttcttccagactgttgtttatatgtgtgtgtctgtgtatctataaaatatgtctgtattttaaaatggggattataatgtgagtgtatgcctgtgtgtgtatgtatatgtatgtaagggattatagcatatatagagttttgttttgttttttttggtcttgaataaagaacattttattattagagaaaaatattagtcctcggctgggcacagtggctcatgcttataatcccagcactttgggaggctgaggctggcggatcacttgaggttaggagtttgagactagcctggccaacatggtggaaccacgtctctactaaaaatacaaaaattagccaggtgtggtggtgggcacctgtaaacccagctactcaggaggctcaggcataagaatcgcttgaaaccaggaggtggaggttgcagtgagccaagatcgtgccactacactccagcctgggcgacagagcaagacgtagtctaaaaataaataaataaatattagccctcatggtagagtgccaataaaaacgtttttttgctactatttcatagaaaccttttgatttttgaataatttaaacattttttggtaaagaaagaaaattcctagatacttttcatctagcctcccctaattttatcactacatagtgttttaactcaggctttttctatctgtaattaaattttttgctaactctgcatctacaaagtgaagttttaatttttttttttttaattgagacggagtcgcactctgtcacccaggctggaatgcaatggtgcgatctcagctcactgcaacctccacctcctgggttcaagcaattctcctgtctcagcatcctgagtagctgggattacaggcgcctgccaccacacccagctaatttttgtatttttagtagacatggggtttcactgttttagccaggctggtttcgaactcctgacatcaggtgacccactcacctcgacctcccaaagtgctgggattataggtgtgagccacctcccccggctagattttctgttttataaagcatgcccgccttcttttttcttcctaggttactataacaacagtaccaaggtggctgtgaaaaccctgaagccaggaactatgtctgtgcaagccttcctggaagaagccaacctcatgaagaccctgcagcatgacaagctcgtgaggctctacgctgtggtcaccagggaggagcccatttacatcatcaccgagtacatggccaagggtgagttcctcccactgcccagagcttgcaagggcttcaaactcaaaaagtaaaatgtgtaagtgttcagaggtcactcaactagtttaattatcaaacagtatacccactaccgaaaaatcaggaaatatgggaagacaaagcagtttataaacctaatcaccagaagtaatccatgtcacagaattgaaatctaatcctcctgttttctctgcatctgcctgcgtgtacctattgccctgagaatagtaccccatatctagtagcccccaataaatatttatcaaatgaattactatgtatttcaaaaaggaatttttgaaatacatatgcttaaaatgtgaagagttcccagaattctaatactacagatttagtacggattgttcagtaccaaattcctctttcatttttttttttttttttttttttttggaaacagagtctcacactgttgcccgggctggagtgcagtggtgcaatctctgctcactgcaacccctgcctcccgggttcaagcgattctcctgcctcggcctccctagtagctgggactacaggcacgtgccaccatgcccagctaattttttgtatttttagtagagatggggtttcgccatgttggccaggctggtctcgaactcctgagctcaggcaatctgcctgcctcagcctctgaaagtgctaggattacaggcatgagcacccagcctctatttgttctttagcgttatctaatattcattttccttttcagcattatctaagtgttcagggtgtcacttttaaatattaatgttttttaaaacttgtggaggttaaagtcctatgtaatcatagaattgctggagaatagacttcaagcaatcaatttttcttctactgtgatcaccttcatatacaagactttgaatcaacatccttcttcctttgttcacctccagttcaggaaacatactaataaactgccaaattattttttacgaagtcctcagaagtaatgaagaaacataagcaatgatccaggattaacaatcatctcatgcacaatggagatgatagtatgatgtcatagctgaatagattcaaaagatgaatattacattttcttatttaatatctgtgagtatttcaaaatatcagtcactcagagtctttccaaacaatggcattgtttgttttaaagcaaacaaaccaattagctcttgtggcttgggttgccatatatagcccagaaaccaggctcagggccagacaccttataggagttcagtaaatattgttgaattaattaacttagagtattcctaatgataggtataaatatgagttttcctatgtaacaatgcctaatatatatatatatttatttttttgagacagagtctcactctatcacccaggctggagtgcagtggcactatcttggatcactgcaacctctgcctcccaggttccagtgattctcctgcctcagcctcccaagtagctgggattacaggtgcctgccaccatgcctggctaatttttgtattttttagtagagacagagtttcaccatgttggccaggctggtcttaaactcccgacctcaggtgatctgcctgccttggcctcccaaagtgctggaattataggtgtgagccaccaagcttggccaacaatgcctaatatttattgagcacttactatatgccagactgctcttggtgctttccatgggtgatctcacttagtcttttcagcagcctgagggctaagtactattgttctgtgtcatagatgagatagcataacgtttactgagcacttgctacctgtcaaccatcatggtatgtgctttggatgcaacctttgattccaaccccccaaaactgtaatatagcctctagtacatgcccattttacagagacctagatgaggtaaacaacttgaccaaggctacccgtaaggctggtacttaaagttctaggggaaaaacaggtcttgctttagagatgaagccataggaggttggagagtttgttcagcagcacactccttcttaggtaggtttccacttttttccaaagcacagttcactcatcaaatattctttgaggctgggcgtggtggctcacacctataatcccagcccttttggaggccaaggtgggaggattgcttgagtccaggaatttgagaccagcctgggcaacatggtgaaatcctatctctacaaaaaaaagaattagctgggtgtgatggcatgtaccctcagctacacaggaggctgaaagtgggaggattgcttgagcttgggaggctgatgctgcagtgagatgtaatcatgccactgcgctccagcctgggtgacagagtaagaccctatctcagaaaacattcattgagcacctacagtaagtgccaagttctgtgctttttgctgaatacagatgggagtgagcctggccaagtgtctgcagagggcaggccttccagtgagctcgctaaagattgggaggtggcagtgagtggatcatggtggcaagtactctgaaatgcatggttctcagacacctgtagtgagaaaagtggtatccacccacattctttctcacctggagcacatgccatgtttcacatcaggtcaaaggtaacagattagaggggactgcgtttgaccaatgccaggaaaaggctttatataaccatacagaattgcaaagccaatcattttgtggggagttcccctgtaatagtaatgatgatgtgaattttgtttggattttttcttgtgtgtttggaatgcactaacttgttctttctttctccataggcagtttgctggatttcctgaagagcgatgaaggtggcaaagtgctgcttccaaagctcattgacttttctgctcaggtaacatattcaaaaagccccgtgtgcacgtgcatttgcaaagacttccctgcgtcaaattcatgaaggagttattgttccagggagaaggaatttctgttgaatgtttcccagcagcagttatgagaaaaagaccttccacaatacaattcttggagatagtaataggacattcacatggattgtgtgtacgtgttgagttttgacctggatatcatcttctataaaccaagtcaacctctttatgttcatttcataagtcatagaaacagtgcagctgaatcaatcactttctcagcatttgggagaggcagttccatgctatgtaagcacagcagcttttaaatgatgcgtatgttttatttaagttacgaatcgaatgtatggatacttttaagtcctctgtattcttgaaaacagaggaactatgtcactttcctgctcctcttctcgctccttcttgttggatgtgccatcaggattctgtgaaatattcatttgtactatttttagtactagcctaggagttgcctgtttatttactttggaatcacatgtttcctgaagtgtatttaagagcagaagcaagttatccagaagccccacaatgtgcccaaaatatcaaggaaatgcacacttgaatgatgccagctgctggcttttactagtttcattgtgtccattagtaatgttcagcagtttgcttgcttgtttctcagtattggcaatcggtggtttcatgaagcccagtgtatgtagcaaaagagatttatagaagttctagggaagactggtccctatagtcttcctttttcactgccacttcttccctcacaccctcttttagttaggaaattgctacggccttcttgggaatacgagatccaaggaatgcatgagtacagaggtgaagcacctcacctaaggtagggctggacacaggttctgtaatagagcatcgtgggctaagctggcattcagcacctggagactggagtttgtgttctggctctgccactcgatagctataccgcttccatttcagaagccctttgcctatttgggctactttattcacctgtaaaacagaatggtaattcctgctttaaggagatgttgttgagagtcacatcagacacagatgttgttgtgtcacatgcttggcacggacacaagcacctcagagcctgctggtggaagctgggaaaacccaagggagggcaatgcccatccttccagtaaaggtgtgtgatgggtgagtcacagtgctcaggcatcctctccacctccgggacttggcaagcctaacaggttcctcatctgagttggaaattcaagtgtgccctgaaatgccaacatctaataagaaagaagcataattgctgtggtggaacagaggggcaaggaaaggacccagcagccctgcctttttagccctgtcctcaaagtctatgctggcccctgggaggctccatgggattccaaggtttccagaactatagtttgaaaaccacctctctgcagtaagaggaataggtggggttgggcacagctctagaacccgtgtagaaaacagatcaggaaatggagaaagcagaagtctgataaacttgggccatacttacacggatcaatgaggccctctactcaggtggtgatttgggtgtccccatgggtcaagagacttgaggagtgtaacaaaggtttgtcacacttgtacagggctatggaacatcgggacacatggcctggagggcctgagtggtcacagccgttccatctgctgggggtctgatctgtacccacagttctttagagtagaagttacacacattgggtatgtactgtacccggagaatgactttattttgtcacatgggtattttgtattgggttttgcatggcttatcttgtaagactttatcttgacatagtcaaagcttttaaggtccaagtcaaagcctctatgctgagtctttaatttagtgaattactaccattacctcgaaaagtaatttttctaacctcgaagagtaatttttctaacctagaaatgaatagggggagaagctactttctagaccttcatagcttacgaggaagattaccacagagcctggcattgactgtgactgttgtgctgtggattccagggggcttcagttgactctcctgtcaactgatggggctgagccccctcggtgacaggagggcctgggggcaatcaaggtcggcaccagtggtctccatccaagccagtttaccaaatccagcccgtgccaggtgaactcatgttcacaggtccagggtctctttcctagcagtggccccttggtggaacccatagttcatctggctcaagtgcatgaactgctcagtgtcactgggagagtcacgggtcagcagcagccggcaggaccctaagtatgttcattcagcacaaaattcattttccttacaactaagcactggctccatttgagttcatctttgctcaagctgcaaacctcactcagactctttcccagcccttccctcaaggtggcgctggtgagaccacctggtctccatccttaatcattatctgcttcttgtacctgtggcttttcttattataatacagataatttgagaaaggggtcttacccttggcaacaaggagtagggcctgtacgcttcagcttcagcctgaaatcccataccttccacttctagtttctgctcactgcgcctgctccctcgtccgcctgggatgccctcactgatgaccactgctacccagtgctcctcctcctccttcacacacctttctgaaatgatctgtctgtgccaagaaggccatctctgcattatcttacctttccttctctatcatgtgccactaattaaatctatcacttttccatagtgcataacatgacaatagaattattattaaagctgccccacggtgacagagatccctggggcccagatacttcgataatccaaccttttctataccttccccccactttactatttagggtggaaatttagggataaagcagaagaggaattacagaagtccatttgctgtgtcagctctaactaaacagttagtaggctgtgcgataatgatgcgacttgctgtcttccataaccgttgtcaatagcgtcagagttgggaaattgaatgttcacaaggggtggttaaattcagcagattgtcacaatgagagattggtcattgggagtagaaataacccagtttacttaatcctagccctagaagaataagggaaactgtgaggggcagagttgggacttttcccaccatctgtatctggcctcttcttcccgctccccactacccacttccccatgccctactctcccctccgcattcccctgtcacccattgagacagaaagtggctaagtgcacgtgacagcctcacagttcatgtgagagctgatttcatcacttcctgtctcagaatgagttctgaaagacttgtctgagctcaagtgtaataatccacactctccaaccatccatagcccattcaacatagatcaagaaatcctgactacagcagctttacccactgcttttctctttgtattaaattaagcaatttagtgctttttgtgctgaaataggaaaatacctctttggaaaggaagtttgatactttcagagcagagagactttgcataattcccttggcttttaggccctatgtcagagaagaaaaatgaacttggaaagaaaaggggttaaaaccagtggggatttccttcaccagaagctgagatggaatcatagacatgtcaaactgagaggaaagagcagtgaaaaatttacagttgcagtttggagagcaaataaatcatcttgtaattcagaccaagtgaatcaaagcatttattactctttggtggcggtatctctgaagtgcaaaaattactaaaaatggaacaattgtttgtgagttaaatgtcagtaaaaactgcaaaatcaagccaaacaaagtggcatgcacctattgtctcagctacttgggaggctgaaacgggaggattgcttgaggccagaagttcaggaccagcctggacaatgtggcaagaatctgtctctttaaaacaaaacaaagcaaaacaaaaaacttgcaaaatcagagttgttgtaattatcatggcaacaagtaacatttattttagcttcttctggttgatacagcacttctacctccattatctaatttgagcccaacagccttgaaagcatatattttgttgtttagtacctcttacagataacgaggtaaacttggacttggccaaggttactgagctagtatgcggaattgctgggacttgatccagggacttctgactcaagataactgattctttcctctgcagcctgctgttgtctcatggttacagttgctgttatggtcattttgcactcaaccctactgtgatatgcattttccccgttatggattttgaccatcaaaattaatgttttctttagctttttccacttcaaaagtctttattgccaagatggaggttatgctcaaggtatattttacccccagtattaaatttaaagccacattttaaggtggaaattggtaaaatgaggaaggtaggaaaactctatctaggaagttctcgacctttttgagtaggagggccttttaacagcagagctttctgagcacaccctcatggttgtagctactgagtgagaaaacagtgtatagattgggaagcccttgtaatatctcttggttgaaactcaccagtatgttggtcgtaaatcaggcttgaagggtctagagggggaagttcttgggaagtttctagaatatttgccaatatcatccaaagtgggtctcttcttctgtctctttgtctggaacgtaagagatgtgttagacgctcatattccacctcaaggctattatcccagtgaatcaactgctttatcttcaaagccttgattagtaacaacctttgattgatagcgtcctcatgtttagttcactcaagctggagggagagttgcattgagatgtcgagtcagacgtggtggcaagtggaagccgcaggtgattgacatggtttgcggtttaaccaggaggccagatccgctccccactccatatataatctcccctccacgtggaaattctcatacatgactcttactgaggcctacacattcccaatcgctctttcaagcacaagaggctccttagagagaaaaacagccagcactgaagaaggcattcatgaatttcatagaggaatctgagccgggtgccgctgtggattcaggggccacatagtggtcaggatgtgatggtccctgagtgggcattgcttggagctgatgcttggaaacctcagctttctcagtatacaaatgttaacacagctggtggttagctctttctcagaatttgagaaatgttgccatgattttgtaaatggagcctagattatgctaatgatggagaaatcactgagccaagaaccagaaaacctgcttctgcatggggaaaatcactttgtgggcaccagtgtcctcgtctgtgagatgggaggcacaggttgggtttcccacagcctcagctctaatattgcatgactaaggacatctccttttatttagactatctatgtgaatcgtcaccaaaagttgcaactaatgattctgaggctatgcagatgacattgatataagattttagcattgctctaaataagggaacacaaatatatcactttaatgcagtacttacatgttgggcacttaaatgctctatttatcttttttgaataatgagtgttatgttttcagcttaaactttgaccatgaaaacttagaaaatggacaaatgaaactagttactgtcagaattgcaaaagtggatcatatgcagtttccttctgaaaaagccaaaggaataggaaactgtcatttaaaaatagtataaaacaggaactcttttttttttttggtaaggtgggggtggggctgttttgcatatttaagcaagaggaatcatgactggctgttaaaatagcaaataaggcagaatttatttttgctttaaatttgattgggaagctttgggttagtgtatggcagaggtggtggtgcttttggcctgcaggcaagatctgtctcttatcttaatgttattttgaccaggggtggcaatttctggtgagtgctaccgtaagtcacaaaatgctattctctttgggtactcatcatggaagcttgcagggctagaattcaactgaagtggtttaggagtgggcagagtttatcaccagctggtcacagttgaaaagtggagatgaaagcagtttgaaattagccaggcttggtggtgcgtgcctgtaatcccagctactccgaaggctgaggtaggagaatcacttgaacccaggaggcagaggttgcagtgagccaagatcacaccactacattccagcctgagtgacagagcaagactccatctcaaaaaaaaaaaaaaaaaagaaggaaggaaggaaggaaagaaagaaagcaagaaagcattttgaagggagcagtggagagtaaattccagctgacctttgtctccagcacttggcttgctctccctgagccccctcaccctcttggtgtggcccgctccctttcactcacacagctatcctgagcacagccaggcactgtgtcaggagggatgagcaaacggcacatggcatggagtgggggacaggtgagttgcaggcaaagacagggtacagccctgggatatggcaagggctgtcagagtgggcaccgcatgctactttcagagtacatggaggaggatggagcgtagtagggtgggctagcaggtggaaggtgggcttcctggaggaggtcaccctgagagccaggattagccctgctagcttgggaaggggtgtggctgcagggatgggtcttcagttgtaggaacctcgtgcataaaggcacagaaaaggagtacacggggatgcaagtgggggtatatggagagaacagcttagggggcactctgagagacatggacattaaggaaactaggccgagcacagtggctcatggctgtaatcccagcactttgggaggccgaggtgggtggatcacctgaggtcaggagtttgagaccagcctggccaacatggtgaaacccggtctctactaaaaatacaaaagttagccgggcatggtggtgtgcgcctgtaatcccagctactcaggaggcttaggcaggagaatcgcttgaacccagaaggcggagattgcagtgagccaagatcgtgccactgcactccagcctgggcaacaagagcaa[450 bp omitted]catctctgtctggcacagtggctcatgcctgtaatcccagctctttgggaggctgaagtgggagggttgcctgaggctgggagtttgagcccagcctgggcaacacagtgagactcctatctctaccaaaaaaaaaaaaaaaaaaattagccaggcctgatggtcgtgcctgtaatcccagctactcaggaggctgagacgagaggattgatcgaacccgggaagttgaggctcaagtgagctatgattacacccaccgccctccagcctaggtgacagagcaagaccctgcctctaaaaaaacaaaacaaaagcaaacagagctcgtctctaaagggtacactctgaaacggacaggacttcttctgagctttttcaattcagagctagattctcaggccctctccccaacccctcactaaagccaagaagcacctgaaggagttcagcccaagtctggagatacttaaacctctcaaccaagtggctttcctggtgctgtccctgaagcaggtgtgaggcctgagttatgaaactgaggtgggttgcctggggataatggggatcgactgagcatttcagcaggaatgtgataggatgagacctgtgctttaaaagttgccccagccaccgtatacaaaaatgattagaaggggtgaaagctagagtccagggatgagggagggaggatgggcctgagcgaggtcagtgttgcctatcacaggcacatagaaatagagaaggaatgtgcatggggcagctgaggaccgccattgcgggcacggggttgaggtggctgatgaaattagttttgctgtactgggtttgaagtgccatgaaacatcagctagagatgggcagctagcgtggacaggcattttagtataggggtctggggctagaggcttcaaggaggctggtgctgcagacagtcatataaataggggttggatgaggtcccctagagagtgtgggaaggggcagaggacagccccagacagaccctaaagaaagggctgagagggacaagtcagagagcaggctggggacaccagaagcacagtggcctgtaaggaggaggtggggttgcagcgcaggcgacggagttctgacacgcagtcagagagcagggaaactgccacgggactttgcgacagggaagtctttgagaacctggctggacccttctcagtgacatggtttgggtggaagccaagcccttggcctctctccctcttcctgatccctagaaccctgttctctgcctgcacaggctcctccctagccctggctgactcctcttcctttttctttctcctctgctgccgcttttctctccatgcttccctgaccgctcagcatgcctcactcttgaaaaaaatgtgatttttctctgtacttaaatgaaaccatgcacttctcattctttttttttttttttttttttgagatggagttttgctcttgtcacccacggtggagtgcaatggtgctcactgcaacctccgcctcccaggctcaagcaattctgcctcagcctcccgagtagctgggattacaaacgtgtgccaccacgcccagctaatttttgtattattagtagagttgggtttcaccatgttggccaggctggtcctgaactcccaacctcaggtgatccacccgcctcggcctcccaaagtgcagggattacaggcgtcagccaccgtgcccagcctcattcttgttttttaaagtggttttcttctgtgatggaataaaatgaaataaaattactgagagaggaacttaaattattggtttttaaaaatatatggttttgtagacttctgtagaaacacagcattcttcgcctaccctcggagcacgtgctgtagctatgcatttgtgtctgtagctctgcagctcgtggggctttgtgaaacacaatgagaagcatctaaaaactgagtcaccaaaagtagcccttgcccccatttaagaccggtttgactgaaatgtgtattctgaggtcagtttggtgcctggaatgcattccccaggttttgctgaggttcccatctcaggcctccacccagcacagctctgcagatctcaccctgattcagcgtcaccccaggaaatggtgtgtctgggctccttggtatggtttctaaggcagctcctctctgccaagcagcagcctgacaccctgcccaaggctcagagggatgccacagcatctccggggctgccagagggccgcccaccctggtgcggaagaccccacccgagctcctgccatagttgctgcctcctggcctcttcccctccccacatcaagacctgttccttggagatgaggcctgcagctgacagccctccagaggccctgccccagtagggctcagagcccatgtgcacaggcagcattccacctaggcaggccacagtccccgggaggtggccacacagggtccccctgagccatggctttctcagccaatggtctgcccagccctcctcactcataatcaagtcctctcatttcttcttccaaaatagatctccctcctccaggtcaccattgtctctcatctgcactattgcagttgctgctttttttttgtcttttttgagatggggtctcactattttatccaggctggagtgcagtggcttttcacaggcatgatgccactactcctaagcacaggagttttgagctgctccgcttctgacctgggccggttcaccccttcttaaccaacctagaggtcctccactcccaggagtcaccatattgattccgaacttagtgcagacaccggatgggcatagcaaagtgcagcccagagctcctgggctcaagccatcctcccacctcagactcccaagtagctgggattacaggcatacaccatcgtgccccacagttgcttcttaactggtgttgtccagtttggcaaacagaagaaattcaaggtatacagtcaaatttggattttggataaacactagcttttaacagaagggtgcccatgtcttcccaggcagccctgctcctaatgagcctccctcctgtctctttggctaccctctttccaggctccacaaagtaggcagggacaattggatgcttttaaaatttttgcctttttaaaattgtggtggtaaaataaacacaaattacaccattttaaccatgtctaagtttatggttgttggcagtaagaacattcacattgttgtgaaaccatcaccaacatccacctgcagaactctttcatcttcccagacggaagctctttgcccactcaatgccagctccccgcggccgcttgctagcccctggccacccccgtgctgttctcggtctctgtgaatcttacagactggatggttttgcatccctgctcagctccgttcagtgggtccccaccacacccagagagactcccaacacctgtgcatgtgactgattcctcagcactgagcccaccacgctcttccctatcccagtgcctctccagagcccacttcctggaagcgctcaccctttgttctgagccacaccacacctcttatcaacaggcaccttccctgaccttccttctgaagcagttccatcccaactcctgcttactccattctcctcagtctcggtccccgcccatttcttccatagcgtgtactgcaatttgaattttttgataagttcttctttacctttttatccccagcacttggtgcagtgccttgtatatagtagatgctcaaaaatgcttgttggatgactatactggccacttaaaatggggattgactatattccgtttaaaacaataaattctttattctctgcttcatacagctctgaatgagtaactagaagaacatattttttgtgtgtttaaaaaaattttttttaatatagagatagggtctcactacattgtttaggctggtcttgaactcctgagttcaagcagtcctcccacctctgcctcccaaagtgctgggattataggtgtgagccaccgtgcccggccagaacacatgcttttgaaaaggttttctgagtcattattcaggtgtatttaaccataaagtattttcttcttccccttcctctaactataggtttactttcctgtacaaaacttacttcattggttgaaataaaagtgagaaaagaagaaggaagtagaatacaagtatctgggcctgtgggaaaaacaaagtgcagctttgttttgcattccttgtggcataaagaacaccaggaggaatgagaaattataaatgaagtatttgacattgaagccaacggcagatgcattctgcttaatttggagggaaaaaaccccacaactgaacaggtttgtcctcccccagtgtcatgcagggcctctcgtggcctctccctgggcgctgaacagagccctttctcagcacctgttggcagaggttgatgctagagttcccagggtgatgggctggcggattcttaacaaagtcaggatttccagctcttgttcattttccacccagcgcccccagtgtctgtaacatcattatctggcaatgttatatgttacagagccaactacttgcatgattattaaaattacatttatacttcaggttgagtatctcttattcaaaatgcttaggtccagaagtgcttcagatttggttttgttttttttttaatcctcagatttttgaatatttgcattatacttactgattaaccatttcaaaaagttttgaatcttggagcaatatggattttgggtttttggattaggtatgttcaacctgtagtattgtcaatggaaccaatggtgtgctgaggtatttttgatgcattacaaggagctgtacggcttgatcttcttttccatttccagaccttctacctcccccacccaggacccccagctttggagtccacgccatcagactgtgccagtctgactcacttcactgctgtggtcctcggatccccgaacactcctccttgctgtggtcagctccggctggcttgctgttcccagcacagccctgtcatcattccatcatttgtagccatccccaccttcaaatgctggcttctctgtgtcttgacttcctcccctccaagactctgtcctctcccctcgagccactctgcaggctgaccaattctgctgctcattgcttcatttgatcgtttccacttcagccattgcctcccttctgtccactcaccctcctgcagccgctccagcccctacagcctcagcctgtcaccagcacttcccgtcccttgaacctgcctgtccctaccgcccctccgctcctgcttctcttctctcctcccctagcttggagacactcattgcccctcccccatgtcacacgcacctggtaaaatgccagccctatggaagtccgacccttcacctattttgccctcatgtccacacaacagctgtgacctgcactgagatgcctagcagctttctgcatttccagttcaagagcaccagcctgaggagcctcatgaaccccgacatgtgcccagtctgctccctctcactgcctgctagaaacaatgccccaccttccctttctctgccctcaaaccttcccctacttgcctctctctgtggattccctgctgtctctttccctgagacaagagaagctgccagccaagagccctgacatgcatcaggtcttgtgctctcttgctgtttcaagacactgttctagaaattccgcattagcgttttccctcacttctgcacttcccataggaatcaaagtaaagccttcactttcccctacatccctctccagctacctcagcctccaggtgtctcctccccctgacaacagaagtgttttaggaactatgctcagtttcccccagttcttccccacccgccctctcttgaacctcccacccctcgaccccagcagcacaagtcagcagtgaccctcaggacactacatccaaagggcacccatctctcagcatcttcctagctgcccaccagcagggtctgctattgtcagtctcactccctcatggcacgttttcctcatttggcttctgggacactgttctctgcttttccttccccctcaccagccagcttctcatttgcccagtggttaaaccttgcaatgtcccagaactcactctttcaacctattttttctccacactaagtctcctaagtgattccattgaaagcattgtattaatttcctggggctgtcagggcgcttaaaacaatagaaatgtattttcctgcagtcctggaggccagaagtctggaatgaaggtataggcagggctgtgcttccaggttcttgggaagaatccttccgtacctcttccagcttctggcagctccgatgttccattccatgtcttgttgaccgcactgctcctcttcccacctctgtcttccggtggcctctgaccttcctctgccttctctcataaagataccagtggttctatttagggcccaccctaaatccagggtgagatttcattttgagatccttaattaaatctggaaagactctatttccaaataaggccacattctgaggttccgggtggtcgtgagttttggggggacattagttaatccagcacagctgtctagactccggccactccgaagcttctagctcagcccaaactgctcccgtgagcccctgctggctcagcatctgcccaaagatgtgtgttgggcatgtcaaactcaatgcaccccaactcagtgcctattacccccttttccaaaacctgtgccagcagccatcttctcccttttgttgatggcacctctgtccttggagctgtcagatcccaacactcaaagtcattcttgaccctcttccttttacattgtatatccaattcctcagcaagtctggggttctaccctcaaagtagattcaccttcctaagtcctgcacatggtcactctgacccaacttgaatacacactcaaagtgagtaatctaggagctggctctctactcctgtgctcagctgtggcttcccccagcccagtggtcacacagcagtcagagcaatgctttgaggcataaatcagataaccccctcactctcagccctccagttcttcttggcttcactcggaatgcagggggaagcccccataaggccatttgcctgcagtgtgtgtcagtcatgatgtagatttgctttcagaagttactccttttcatacattttttattgtcttatttgtttggaaatctatgtttcagggtttcatgtgcttatcattaaattcaccttggattcttgtttaaaatctgcaggtgtctaggtaggtccctctcactgttagcagtcattaaggactagggccctgaataagccgcaggggtcctgtgggcttcaatagtcgggaaacactgccattgagaagttgctgaaccgagcaagtgatcctttttctaggtcacgcatcttgcaagggaatgctgcttttccccattagaaagctgcactgctggggaggaactgtacttctctcactgctctaagtgagtgaaacccagtaattgtttgctgaaatcactaggcatggacaagtcctacctggtgagcaaaatgcttgaccttgcttcttcctcagcttcggcccttgcagccacacccacctgctcttgcccccacatccttaggtaaaggaaaatgcaggagcagccacagagagcagacgtcacaggcttccctcgcaaacacatggtattttgaaaacgcacttcaaaggggttgaaatataaataaagaggatagcaaatctgtttcaggtatatttggaatttgttagatcttgttacagatttcctttaagtttgtcacaggacaaataagtcagggattgttttcggagcccaggcgctgtctttatacaggaattcttttcagaataacacacatcaagttctttaaggtattttgtcttagttgaaatatagcacagctgcctgctatgtattttcttcttctcagctatctgacatggtgtatattcatgtgctggattattattttctgtcttcccccatcaaagagtaaactctgcaggcaaggactgtttagtggacctgcaactgggtggggcttgtggcatacaggcaggactgtgtgtggttggatggaagggggaatgtcagttctcgtaagctaatggagataccttgaccttcagtcttttaatatactaagggtgaccaggctcagtggctcatgtctgtaatcccaacattttgggaggctgaggcaggaggatcagttgaacccaggagttcgagacccgcctgggcaatatagtgagacctcatctctacaaaaaaataaacaaaattagttgggtgtggcagtgagcacctgtggtcccagttactcaggaggctgaggtaggaggattgcttaagtcctgtaggttgaggctgcagtgagctgtgatcctgccactgctctctgtcctgggcaacagagaccctgtctcaaaaaaaaaatccaccagaatcccccccgcaaaaaaaaacgctaccttatgtatatgctaagggagtagtcatggcatggcatcctagtgacattacaaatagcagccatatccctttacattcctgccagcagtgtgtgagatttccagtttctccacatcctcactaacacttgttattttctgggttttgataatatctatcttcggggtagtacagtgagttttgaaatatctatcccaaagacatagttcagtgagtttttgcaagagaaagtaaatgggtattcattgacaaacttttcttcctgttttctaaagaaggtaattctgtttcgtggacacttaatgatttaaatatgggtatttggtgaagctgtcattttgaaaatcatctctccctaaggcattgtgggtccttgcatgctgacagattgactagattttgagcagtcacagaaatctccaccagccctaagcttggatatgccaaacactgcctcatctttgagctatgaaggtagtctaacagactgcaagctttaacttgactgtttattatgattattattattttagagacaggatctctttctgttgtcctaggctagagagcagtgatgtgatcatacctcactgcagcctgaaactcctaggctcaagcgatcctcctgcttcagcttcccaggtagctgggaccacaagcatgtgccactacacccggctaatttttaattttttgtagagatagggtcttgttacgttgtccagggtgttctgaactcaagtgatccttcctgctagtcctcacaaagcactgggattacaggtgggagccgccacattcggcctaagttgaccattttttaaattatctgactttcttatttctttttgcctcttttttttccactgccaacttggtgagcattgtatttttagaatagaataaaaagaatcttttcttgccaggcgctgtggctcatgcgtgtaatttcagcactttgggaggctaaggcaggcggatcacctgagatcaggagttcgagaccacactggggaacatgatgaaacaccgtctctactaaaataaaaaaaattagctgagtgtggtggcgagtaggtcccagctactggggaggctgaggcacaagaattgctcgagccccggaggtggaggttacagtgagccaagatcaggcactacactccagcttgggctacagagtgagacttcatctcaaaaaaaaaaaaaaaaatcttttctgtttatttatttattttgagacagagcctcactctgttgcccaggatggagtgcagtggtgcagtcttgtcttgcaacctccgcttcctgggttcaagcctcagcttcccaaatagctgggattatgggtgcccgccaccacacctagctaagttttgtattttagtggagacagggtttcaccacattgggcaggctggtctcgaactcctagcctcaagtgatccacccacctcgtcctcccaaagtgctgggattataggcatgagccaccatggctggctcaaatcctttctttttaaaggaaggagccaatgtggatgaatgcttaagagcacagactcttaagcctggaccagccagactcaggttggaatcctggcctttctagggaaattgtaacctctccaagactcagcttcgtcctcgttactatgaatataacctactttatgggcttattttaacgactaacatgcctagcacagtgcctgggcaagtagtagctaatacatggtagcaatcatcatcatcatcaaagtatagatttcactatttcttagcagttatacttggaaaaggagattattatgataaccaaataaagctaaaataaaatttccaagaaattttgatcccaaaaaagtagagtacaaacaagaatgcatgagctctctgttccatccctttcctccatccaaattatggattggagattagaggaatctagtgttggggaatcaatgaatattaacaagtagaaaagtgtttctgtgacaactgttgagaggtataaaacaaatgctgtcatatttgcagtacagacaagttgagttcttaaactttttgcaaactccctggtgtgtgtgtgtgtgtgtgtgtgtgtgtgtgtgtgtgtttacatcctatttttttgttgttatcattaaatggtctttttaggtcagtttgggattgactccaggggcttcctgttataaaaaaatcctttagagagactgtaggttttactcaatttctacttatttttcagttccaacttattaatattgttattttataggcatcctagggcttttgaacatcattaattatgtgaattcttctttttctcaagcataggaagacaatacatccttagagagtaaggtaaacagtgtctactaaaacaggtaaagcaccaggaaaatcagatcttcatttttcctactttttgacaggtttctcatttaatttttctcactgcttgtctagatgacaaatgttttccaagcagccaattctaagacaggttgcgttttcagttccagtttctcatttaggctggaatttcctggggtagtttttagctttgcttgagagatcacattcagcccctcagtgaggttcctttgatcccttttttccctcagtcatctgacagaaatgggggttcttctcattaaagtgaaaaaaaaaaacccaaaaaacaaaaaactcaccgagcaagatagccttgcttgtctttgccaatttctcaaaaagcgatagtaattaggatgaacagaagagcactaaagcaagatttccagagtgaggtcatccacagaacacttcattatttgtccaaagcattgctcatgttctctggtggtagcagccgggtatgtgtgctgagcaaacagtccacagggcacatgcccagcaaggctggtgatggctcagagcctgcgcctcgggtgggagagagcttgctggaagccggtttcaccgtgtgggatgctggggttgacagacttctcactgggcctttgagaaaagcgggaaagatgaatgacctggatggtcatcactaggaagctactaagcaggggcattatttgagctctgcttggatttgtaaaacataattgagattgtgctctctatcaaacccgcataaaagaagtccatctgatatattacctagggccttggtggttaggaatttcccatctctggtgtggtcataggcaacccacttctcagtgggtgtgtttgatgacacaaaaccgcagtgcctcatgagggagagcccggttgcctttcctcgagaaggtccaggcaggtgcatttggatagggcttgctgagcctactcacatggacactccccattcaggaaatagcaacttggactttctactttaacattgttagaggagagggaatttaaatgagtgcattccactcaaatgtttctaaaactttggtctcatttaaccaaaccaaaaaccatctgagacaggtctccatcaatttagaggtttattttgccgaggttgaggaccatggctcatgacacagccaccagagatcctgggaacatgtgtccaaggtggctgggatacagcttgatcttacacattttagggagacagaagttataggcaaagacataaatcagtacacagaaggtgtacattggttcaacccaggaaggcgggatgtcttgaagctgggaggggaggcttccaggccataagtggattcaaaaatttcctgattggccaggcacagtgactcatgcctgtaatcccagtactttaggaggccgaagtgggtggatcacctgaggtcaggagtttgagaccagcctggccaacatggcaaaacactgtctctactaaaaatataaaaattagccaggcatggtggcggacacctgtagtcccagctactcaggagactgaggcaggagaatcgcttgaacccaggaggtggaggttgcagtgagctgagactgtgccactgcactccagcctgggtgatagagtgagactctgcctccaaaaaaaaaaaaaaaaaaaaaaaagtcctgattggccattggttgaaggagttaagctttgcctgaagagttgtagtaagcttgagttaaggtataggaagtggtggttgtagaagcaaaggttcttatcatgtagatgaagacttcaggtagcaggcctcagagagaacagatgtgaatgtctcttatgggaccttaaaaggtgtcagttaaatctctcctggatcaggaaaagacttggaaagggaatgggattctctatagaatataaatttcccccataagagatggctttgcagggccgtttcaaaatttgtcagagaaatatattttaaggtaaaatactttgatcttctttagaacctgttatctgtcatgtgatgttatactaaagtctggttggaatttggtatcttattgctgcaaagagtctgtttatcagtctcaggatctctattttaatgtgaatgctggtcattggtgtctacactccaaaagggagaagggcataatgagtcatgtccaattcccccttctcatcatggcctgaactagtttttcaggtttctttgaaatcccctgggccaaggggagggtctacccagttggttaagaggcttagaattttaattttgttttacatgttttaaacctcataccctggggaaaaagttatttgcaaagtaaataggactctaaattttgtattctgtccccactctgcccagcttaagtgtgtgcctatttaagggtgtctgtgtgtgtgaaatcatactagagatgtgaatataccaacaaatagagacacgccggcagtactaccacgtcaacttaagcagctgtgtccatagtggcctctgagatgctgctcggggtctgaggtctatccctgatcccactctgccaccagccctgacagctgggttgcctccacctggaggaagtggcaccttttctcacctgctgtggccccaagggtatctttgttgaagggttgacacttcctgtttcacaccagcagtgggggagaaagtcctgcccctttggggtcagaacgttgggtaagaccttacttctctctttctctggtccacttgtgcctctagctgcctcaaagccctgacttatggaaggcatctgttcagctgactggcagtggaggaagaggcagacacttggtgactaactccttttcttctcattgtatgttacaaaggccactctagatgactggaagtctatctatccagccaaacaagataagcctgcccattaactcaggaagcattattattaatatgttctgtgcacctagacttttcattgtgtacaagatgccaagagtttcaccagaaccccccacccccaggatttgctctctgacccagtagttctgtgcctcctcccaggacagcagtgggctcagcatggtcttctttgtcatcagcttcaggcacaggcgttttcaggaaacaatcaccttgctccacactcagagttttggtcatggtgcacccccacatgctcccttgtccctgtgctcagtaaaccgctttttaaaaacgaaaatgaaaaacacagaaacagcacaggtagaaaataccatcatatgttttcactgaaggcaaaaaaagaaactaaaaaatgtgcattggccatgctatttgaatcaaagagcacaagaagcatcagcacatctcagcttaagtcaagagtatggaaacctcactgacatcgtctctttacgtgattagtctcatttttggtaatagggatgctttttatttcagatttccagtagcttcacacatcaactttctgagacagagttagacatcagcactgggtgaaagagacagtttaaattagttctttggtgtcggcaggtggtttagaaagttggggttttcttgtctttgttcacccctgggcctgacattataatgaagagaatcacatggcctaagatgaagagaatctcctcatttggtttagaaccaaaagattttatcggtttcccaagctctgtgagtaatgtctctgggcccagagctgtgatagagagggagaggagctgaggcctgaccctgtatcccctgcctccaagccatgaggcccacagggtcctgacctaagttgcaggaaaaacaagctcaagccatgtgttccaaacagttgatgggctaggaattcttccaaggtgtttggagaaccttcctcacctgccctttccctcaccccagctccatatggagcctcctcctccctgcctgggctccttatgctggccctgcacatcttactccttcttttgttaagctgagttgcatctggacttcctccccaaccattatgatggtaacagtctacctgtgaggttgctcaaaggcaacgtgttgagactaagattttgttgcaatcctaaaatagcttaagctttcaagcctatgatctagtgctctgcttctcaaactctaagctctggaggctgggaagtccaagatcaaggcgccagtagatacagtgcctggcgaggtacttctttctgtgtcctcacatggaagaaggtggaagggcacaaaaagggtcaaactctctgtgaagcctattttataagggccttaatccaattcatgagggaggatctctcatgacccaatcacctcctaaaggccccccctcttaatacgattgcattggagattaagtttcaacatgaatttggagggacacattcagaccatagcatcatgcatttgcagtgggggtaagattgcccccaagggagcaaaaattgatcccttaggggtgataaaaatcttagatattacaatagtttgtggccctccaaagttcatacctacctaatacaaccttctttcctcatgtttaatttctcctgttaaggatgccttaactttaaattttaattttaattcagtaattcttcctggaggaataataatgaaaaaaaagtttgagaaacaatgttctagacagagacaacctaaacaaagttttgcatgtacttcctgaaatgggaaccagaacttggcctggggagagcttgtgattccctttctgaggggtgaaatttgtacttaacaacaatgagaggaaacctcagaagtctctttttatcttctcagagaagaagtactctctcaatgaaatctttgggttccagaagcatttagttatgagtactgagctctcttggtactgagctctcttgtgggtctgacattctggagtgtggtgttagaatcgtggactttgaggtcagacacgcctggtgtaaatgggagcattccccttcactctgcagctttcaactggttctttaatttctcaaagcctcatttgcatctgtacaatggaagtaaaacctacctggtcaatttgctattaagatgaaacatgaattgagtgtaaaggatgtgaagcagtgtttggtgtatagtaggtgttcaattagtggtggggaaatggtggttattaatatccatctacctacccacctacctatcatcatcatcttagtaaaatgtctgtgggcacaaaacaacacaacaatcttctgaatcaaacacatcctcttctcatcaagcttgaccaactccatgtaactcccacagaagtcaagctttccaagctgctggaacaataggaagtgggagtccctggggacagctgagccttggtttatgtatttatgtgacagctctttctgtagtgctgaacgctacatggccctggaagaggaagaaggtattccatgaaaagttgacactacattcaatcagccaaaggagtctctgatttcttcctgctgtttgaaatagagctggatttacttagccgtagtaaatagaccaccttcaacaacaacaaattaaggttttaaaaaaaataaaccaagaaagaacaatacacaaagaccagggaaagaataaagagaatgaattaattttatataaagggagaggtgtgatatttatcatctgaaaagcaagtcatatctgagagcttttattttgctcccatattcattatttattcaacttggctaatgctgttgtttctaatcctgtcttggtgaacgctttaattactgtttggaatctgagctccttaaagcactctggcatggaaaagaaggccaaaatacactaggtttgttgcaagtctgttattatttctgagaatcatttttttaaatgcactcagatttatgcaaatgcgggatgtgggtaggtgtgacaaatgccttactaacaagtccctggagtgctttttgtaatgagttgatcatcacgtgtgtccttgctgctgtgtgggaggctgggtccctgccatcatgcccacctgtgtggccgatcaacagcgttgggagaggggcagcacaggttcctggttgctattgtcaactgtggtttcaggcccaatttgggacttcagccagctttggcttctttgggttcttggcccagtttatatataattattggaatgttaggtagataagtgtctaagagctaagaatttttaaaggctgcactaccatggagtggagccgggaggctgggacagagtcagctatgaccgctcaattgctgctgtctcatctgggctcctgtaaccaactctggtctgtttgagccaggcatcgtggttctatcgccaaaagcctactgtgttataatcgtacactcctttctttcacacatgctcagcctgatcttcgctctccacttttcccagttttactggctttttctaacaagtcttgttgaacttgggttaccagcagacaaaaggaaacagaggcagggctcctctctcccagccgccaccaaaattgccaccccgtgtcatctgtttcagtagtgcccactctagaaggagctatcctgaacttcctgacgccctcaccatgccactgcctgctgtttctgggcagcagaggcttcctagagaaagtcagactcaggagctctgccttcacctggttatcaccactgcccaccttctgttgacttcccatcaaggctgtttgaatcttttccagggtcaggtaaaagctgtgcatctccccagtgctcagggtttgtgacagttgggagaaaggcaggggacacgaagtcactgctctccaaacctgccctgtccttttcctactgtccgtctggtttctgctccactcagcctctgtcccacttctcaagtccctcatgaaatgaagcctcctgctgtgcttagtgctgtgctgtgctcagtgctgggatgggttcatgttcctgcagaaattgtggacaggtagtcaggtgaggagcagggagcactggggatgcatgcacacctggcaggagagggtatgccaggcatggcttccgggagaagtaaaatctcagctgagacaggcaaactgcataggtcgggtgaaaggggcagggagggaatgagcgttccacacagaggcagggggtgtagaagcacaaaggagggggtcgtggtgaggaggtggagggctgagccggggccgggtcatacggggccttggcagcagtgcaaaggagcttggaccacattctttgtttccactcggaagtgaaatactggactgaatagtctttgagactgatgtaggccacactgattattttacttgagatttttgtgaccatgagaatatcatctgccaaatccctgtagtagtgggctaacaagatagtattctggtcatgtgaaaaccccagcccatttcccaaaggacttactttgtctctgataagaggtttggtgacaagtttgaaggctccaatgtatacaagtgagaatagaaaagatattttcagccctagaggtgtttatcaactggctaacatgacaccactgagagcattaaacagcataaaaataatgacaaagctgtgatcagcagctgcagatggtttttgtacacattgaccatctagggtgagtaaaggggagttcagggaaggcccacggggcagaaggtgaggccagggattggcctagaggggaagcaaaggcagacccaataccaaggagctaatcttttgctaagcaacgtggtctggaactggcggcctgaagtgcttgattaccagggatactgttgcagatgactggggaaagtcagatcctccaagccgagccacctgcaattcaaggtagaatctggcagaatacattcattcctgtgtgaaaaattcgaatcagagttttctctaactgcttaccagataaactactacttggctttctttacttcttgccctttttcttgcttcttacttccctcctttcctcctctctccttgtttccttccttccttcatttccttgttccttccttctttccttgcttgctttcttccatccttccttccctccttcctttcctttcttccttccttctccttaactttataatttggtaatgtcttccttaaaaacctgactttggaacgatactacactttctattcagcaacgagtagtagttttgcctccctatgttattgttgtgtttaaatcctggattctttcctgctgtcatactttgtcatgagagtgaatcttgccgggcgtggtggctcatgcctgtaatttcagcactttgggaggctgaggtgagtggatcacctgaggccaggaatttgagaccagcctgatgaaaccccatctctactaaaaatacaaaaactagcatggtgaaaccccgtctgtactaaaaatacaaaaattcgccaggcatggtggtgcgtgcctgtaatcccagctactcgggaggctgaggaaggagaatcacttgaacctaggaggcgggaggttgcagtgagctgagatcatgctactgcactccagcctgggggagacagtgagactgtctcaaaaaaaaaaaaaaaagagtgaatctttgtgattgtcctggagggaatgtgcagagagaacttggagagccagttccatgggctgttgattaacctgacagaaacgacatcctgttcttgataccttaataatttatttgtattagcatgtcactttctccaactctattttcatagttggttcaggctgccataataaaattccatagactgggtggcttaaacgagagacatttatttcccacagtttaggggcaaggaaagccctggcaggtttcatgtctgatgaggggccatttcctggttcatagatggcaccatatagctgtgtcctcacgtggtggaaggggcaaggcagctctctggggtctcttttacaagggcactaatcccattcgtgagggctccaccgtcctgatctaatcacctgccaaggccctgcctcctaatactattgcctcggggttcaggattgcaacatttgaactttggggtagggggcggggaatgggacacaaacattcagaccatagcatctgttttctgatttgagaaactggcataataacatctatgtatctacatggatgaatttagcagggtcttgaaaagattcttcacacattagaaaatgttaagacatggccaggcgcggtggctcacgcctgtaatcccagcactttgggaggccaaggcgggcggatcacgaggtcaggagatcgagaccatcctggctaacatggtgaaaccccgtctctactaaaaatacaaaaaattagccgggcatggtggtgggtgcctgtagtcccagctactcgggaggctgaggcaggagaatggtgtgaacccaggaggtggagcttgcagtgagccaagatagcgccactgcactccggcctgggtgaaagagcgagactccgtctcaagaaaaaaaaagaaaatgttaagacatgttcctttttttttttttaagatgaccattgttggagatttggcagagggtggtcagttattttagaaagggctcaaatggtgattgccattacccactgtctttaaaagctgaatgatcaaaatagtatacatgaaaagatttcaggaattcataagttttccggttttccttgatggcactttccagtcacctaccctacatatgaaaatgggagcctatttctgttttcagattgcagagggaatggcatacatcgagcggaagaactacattcaccgggacctgcgagcagctaatgttctggtctccgagtcactcatgtgcaaaattgcagattttggccttgctagagtaattgaagataatgagtacacagcaagggaaggtatgttgcactaatgatctttagatgttttattattgtgttttattttgtttttgtctgtttttgacaaagcaattacaatagtcaccattaagaaaaacttatttggtacaacatttaagctgtaccataattgtctgcttatggttctattctaatagtttctagaaggtactctcttgattaactccacatgatacttttgttaggcttacaaatgctatcagttgtatttcaattaagcaatgcaaaacacaaatagattcagcaagatgattcttgtttattttgtattgttaaagttttcactcaaacaatgaatataatatacggggctgtggagaaaatatttgtaacattaattctatattgtttattccagccttttaattacaaattaaaacatgaacattaccatacacacagaactaaatataatgcaaaaaatctacttctttattttcccacattctgtattatatatatgaaccaaaaatgcacagagaggcctaagttccccagcctgtggcacattgtcagggggccaagcatggtcgggactgcagggcctttcttgggctaggattgcccacgtggttatgactgaggattcttatgctctcacccacgagagctgagcaaatatttttgcagtgctcactgtcttctggaagagacaagcactttcttgaaattcctaagcattgttgaacaaggattattattattttattattttgaacctgggaggtgaaggttgcagtgagccgagatcgcatcattacattccagcctgggtgacaagagtgaaactccgcctcaaaaaaagaaaagaaaagaaagtatggggtcacatgttcatgacttttttgtttaagtttaaatacccaagtaagaaccacatatcttcttccttaggtgctaagttccctattaagtggacggctccagaagcaatcaactttggatgtttcactattaagtctgatgtgtggtcctttggaatcctcctatacgaaattgtcacctatgggaaaattccctacccaggtatggtttacttagctatttacaatcaagctgtataaatgagaaaaagtcaggttgcatgaaggcattaaaaagtaataattacttcatctacccgatagcaaagaataagtgctttgagccagaacttgattttcacgggctgggcatggtggctcacgcctgtaatcccagcactttgggaggccgaggcaggtggatcacctgaggtcgggagttggagaccagactgaccaacatggagaaaccccgtctctactaaaattacaaaattagccaggcatggtgacgcatgcctgtaatcccagctactcgggaggctgagacaggagaattgcttgaacccgggaggtggaggttgcagtgagctgagatcgcgccattccactccagcctacacgacagagtgagactccatctcgaaacaaaaaaaagacttgatttttattttcactatctttagcataaattgttctaagagtgcttagacacttctttgcctccttattttgagtgtgtgttcttgttctgcactgattaattccaccacatactagaatgttccgggcatggttgttggtgtcgagatgaggatggatagacacaggggctcctccaaggcagtccccctgactggaaggaggaaacccacatggagacaaggatttccgatgcttggttttgtaataagtgccctggagtctctctctcttcaagaaataaccacctttgtttatcagtgggaggcccttctgctctttaacatactggtatcagtgagggcatcattcagtatttatttccagattcctaacacctgaagcctgcagagccagattctgaccatccctccatttttccatggtctgtgctggcatggttaagaagagggatttcggccaggtgcagtggcttacacctgtaatcccagcactttgggaggctgaggtgggtgaatcacgaggtcaggagttcgagaccagcctggccaacatggtgaaaccccgtcattactaaaaatacaaaaaattagctgggcgtagtggtgggcatctgtaatcccacctacttgggaggctgaggcaggagaatcacttcaacctgggaagcacaggttgcagtgagccgagactgcacccctgcactctagccatggcgacagagtgagactctgtctcaaaaaaaaaaaaaaaaaaaaaaaaaaaagagggatttctcccagagccttcatattttcatttatgtttgactattaacaaaatatttgcatgaggggaatttaaaattaaatttttaatgtttaaatctttctcctattcaaaaaatatttgagtatgctaggcactctcagctgctaggatgccatggtatctgcccatgtccttgagagtgaatattgtagtggggagagactgatgtttatcaaacacacagccatcctgtagggtggtgagagtagtgtggagcctgcgtggagtggcttagggattggcgagtactcacagaagggggtggggagctgctggttttattccatggtcctggcagcagcagggactcacagagggagggagtcttgggctctctgaggtctgcatgtccccatggggagagcagccagagcatgggcttggccaacaggagcaggaggccagcgtggtttgggcctctgtgagtatttgatggatggatgggtgaatgaatgaatgaatgaatgacgcacctaggccatttgatctctagacagtcgatggatgagaaagaaggctatgtagctgggggttagagtggctcagggagagacttactggccatgtaagagcagcccctcttactctgctgagatgcaaaccagggaaggcttttggacagagcagccacacagtctgcgtgctcccatcactactgtttcatgtggggatgagccacagagaaactggggcagggaccagttggcagctgaaagcctttgggtggtgtctgcctgcacagtggaccggctgtcccaggaaatccctttagtgccagcatttcatcttccagctgctctagacactgagattaatgaattaacattgctgcaaaataggaaaaatatttctaatcagccccagtgtctgatgttatatatctctatctccatctatgcctacatctctttctataatctgtctgtagagaaagattatatagtcagattatgtatataatctgacacctgataaacatacaatctcataaaagaatgttttgtgatatgcgtggtgtgctgcatgtgatgtgctaccatggcccctgaggcttggagaaggtgattgggcccctcgctggtggcaaagctgctctgagccccagatccatgtgcctcccaagacccctcagccaatgtgcacaatgcccaggatttggaaatatttggggtgaaaaatcattttttgaaaaaagaactggctgggcacggcagctcacacgtgtaatcctagcactttgggaggctgaggcaggtggatcacctgaggtcaggagttcgagaccagcctggccaacatggcaaaaccccatctctactaaaaatataaaaattaggctgggtgcagtggctcacacctgtaatcccagcactttgggaggcccactttgtgggcggatcacaaggtcaggagatcaagaccatcctggctaatatggtgaaaccccatctctactaaaaataaaaacaattagccaggcgtggtggcaggcgcctgtagtcccagctactcgggaggctggggcaggagaatggcatgaacctgggaggcggagcttgcagtgagctgagatcgcgccactgcaatccagcctgggtgacagagcgagactccatcttaaaaaaataaaaaaaaaaagaataaaataaaataaaaataaaaagtagccaggtgtggtggtgcacgcctgtaatccggaggctgaggaaggagaatcgcttgaacccaggaggtagaggttgcagtgagccaagattgcaccactgcagtctagcctgagcgacaggaaggagactccatctcaaaaattaaattaaattaaattaaattaaattaaattaaattaaattaaaaaataaaaagagaaccagtagaaaaatggtgagaatcataaaaatatgtttctctctatatggaagaacacaccagaatccatcgactagtctgttccctgattggcttgtccctggaaggactggggatgtgagatatcttcaggagatcgggatcagtaaattttttagtcacgagagttgtatgttacgagagcctctagcattagggttataaacataatcaagcaatcctatttacttcacatgagaagacttgattcatagcacagaaatcggtaaacattgccaaaatatgccattttccacacggttataaaactgcatatgggagagaatccacgatgaatggaattatctgaaagtactttctttacgcagtaaactgctggctatgtttttgttttttgtttttttttttttttgagacagaatctcgctctgttgcccaggctggagtgcagtggcgtgatctcggctcactgctagccccacctcccgggttcacgccgttctcttgcctcagcctcccaagtagctgggactacaggtgcccgccaccacgcccagctaattttttttttatttttactagagacagggttttgccgtgttagccagaatggtctcgatctcctgaccttgggatcctcccgccttggcctgccaaagtgcttggattacaggcacgagccacctcactcgacctgtgttgttcgtttttaaagtactttagaagctatacaggccaggtgtggtggctcatgcctgtaatcccaacttgggtggatcacttgaggccaggagttcgagaccagcctggacaacatggccaaaccctgtctctacaaaaaatacaaaaaaaattagcccggcgtggtggccaacgcctgtaatcctagctacttgagaggctgaggcagagaatcgcttgaatgcttgaacccaggagacagaagttgcagtgagccgagatgcgccactgcactccagcctgagctacaaagcgagactctgtctcaaaaaaaaaaaaagaagaagtcatatcatatacttagctttgtaaaataaaaaggaaataaaagaaaggaggaaaaagaaaaaagaaagtcacatataaggcaaactcatttttagaggagatagaaatactaagataatatactgaaatgttagcattgggtcaagagataataggttatattaattttcttcttgatgaatttctgaaatttctaatttttttacaatgatattgttattaaatattttattctttttttttttttttttttttgagatggagtttcactcttgttgcccaggctggagtgcaatggcgccatctcacctcactgcaacctcctccttctgagttcaagcgattctcctgcctcaccctccctagtagctgggattacaggcatgtgccaccatgcccagctaattttgtatttttagtagagatggggtttctccatgttggtcaggctgatcttgaactcccgacctcaggtgatctgcctgctttggcctcccaaagtgctgggattacaggtgtgagtcaccgcacccggcctaaatattttattcttatctaagtaatatatgcacattaaaaaagtagtacagaaagacttcctttttttttttttttttgagacagagtctcgctccgtcacccaggctagagtgcagtggtgtgatatcggctcactgcaacctccacctcccaggttcaagcaatgctcctgcctcagcctcctgagttgctgggactacaggtgtgcaccacaatgcccagctaatttttgtatttttagtagagacggggtttcaccatgttggccaggctggtcttgaactcctgacctcaggtgatccacccacctcagcctcccaaagtgcagggattacaggcatgagccaccgtgtgcagccacaaaaagacttccaatgaaaaattccccatgcctgcgggtgctcctcaaagtaatctacttttgggaattttgattccttattctagcgtttgctgcatatagttctaaatattctactcataacttttatctcttaattaagttttttccacttattattagataaggatatggccacatacttttatttttcatttatttatttatttgacagggtcttgctctgtcacctgggctggagtgcagtagcatgatcatagctcactgtagcctttaattcctgggctcaagtgatcctctcgcctcagcctcctgagtagctaggactacaggcgcatgccaccacacccagctaatttataaattttttgtagagacagggtctcactatgttgcctaggctggtttctaactcctgggtcaactgatcctccctcctcaacctcccaaagtgctggaattataggtgtgagccaccacgcccggccagccacatggtgttaaattcaagagatacaaagaggtgtaagctgaaaggtcccccactctattcccagccacacaattctctccccataggcaaccagtgttctcagtctctactttagagacatcctataaggggagtcatacagttttgccctaatgtctggtttatttcactcagcataaccctcaaggtccatgcatggtgtggcccatgtcttcagtctttcttctcactcctggtcttccataccacactttccccacctccacttgggcctagcattccctgcatgaagcttctccattgtttcttccagcatttgcctgggcactggtactatgggctccaggtactgtcctgccctcggcgctggcctccctccctcatggtatatgctgaccacacagtgtgtgccttcctgggctgagttgggatgggccgccttgcccgttgtcagtgcccctctctgcaggcacgttggttgcactttcttcctcttggctcagaccacttcttcctctggctgccagatgtctcttagcatcatcagagatggagtttaagtttctatttcttgttctcttttttgttttgggatgaattacagaaaaaagaaaatagtgaggaggaggcaaaagatctttacttcattatcttaaaaccaaaactatgattatatttctctatcaattttatacagaaaaaaagaggggtctgactgggcatggtagctcatgcctgtaatcccagcactttgggaggccgaggcaggtggattgcttgaggccaggaatttgagaccagcctgggcaacatagcaaaaccctgcctctacaaaataatttaaaaattaccagagtatggtggtacgcacctgtagtctcagcaactcaggaggctaaggtgggaggatcaccgagcccagggagtttgaggctgcagtgagccatgattgcgccatgtactccagcctgggcaacagagtgagaccctgtctcaaaaaaaaggtgggggtgtcttgttggggtcctggttggggtcttgttttgctttgtttatataaagcaaaaggtttgaaagtgaaaaaattttctgaagcatcatgacttttctggctgtttctgaccagatatatctaacatcttaatgccagctgaattagaatcaagaaatttgtcctgctgcaaacaaacactcaccttggtcacaagcaaagctcagaaaataataatagtaataataatttgcccttttggaaggagtatgattgggtgggagactgtactcccagggtatctagctcttcctgatacacatacacacaaagggccctgtgtgactgaagactgtcatagtttgtggtacagctgtgctcctccctgtcactagctatctgttccttttctctactgtaccacatttttctccttcttctgcttctttaccaacttgtagtctctgctgatttctacccactccagatgccaccttctgctccccaccacctccttctggtgagggcattgtcctgactgggctgtgtgccatttgaggatgatgctctgtcttaactatctctgcatgtctcagagctcagtgctagttcatgacccatagtgagcactcagtgtttgttgaaaggaggaaggatggaaagtgaaactgtgtgccttctaagcagatcaccagctaatgggtgtttactttctttaacttagcgacaggccaacaccaactatcacatgtaatcttagggtctggttgaggtccctctcctcttcttatttctttctttcacaagacttgtcatttaatagcggattttatttattgctttccttgtacataaaaagataggcttcagattcccttcttccaattcttcttatcaagtcgaattccccaaacagggtggagcatgtccagcctttaccagcatcatcgagagtccttcagagctaggagaacatactggaaccaggaaaaaaaaatctgctgtggggctagggtgacctagaaagctttatcttccactgtggctgcattctgaccttttatgcaaatgagggatctccaggaaggaagtgaaagagatattccaaactgagtgtgcaggtccaattgctatttatatcatactggatgttagtcctcccaccacgatcccagaatttcacccaagaaagcagaagtatacacaaatctttcttctgaaatttatccaagttataagagccagagcaatgctgaggccatatcattttgtggagactaaaactcccaaataaagaggatgatacaaatctgtctttcgctttaagcaatgaaaatcaaatgaagtattttagttagaaaattctagtcacacaaatatttgaagatagtgtttcagaattagactcaggaaaatggatttgctgtataaattctcaagagatctgaatcattataaagtttgcttagatctttcaatttcaaaaacaagggctcttccacgacagaaatgatcatgtcttctttcagcggtttaaattcaggaaaggtcactgtgtccttagatgaaaaaaggtaagttaaaggcagaggatctcaaagtttattggccataagccattgtgggaaatacatagaaacctactctgtacataaagcaaacgtttcataaaaccatattgacctttcctatgtgcagtgctttctgaccttttctgttttattctgttataattcattttaaaaaatactggtaattggctggatgcagtggctcccgcttttaatccagcactttgggaggccgagacaggcagacgacttcaggtcaggagtttgagaccagcctggccaacatggtgaaaccccgtctctactaaaaatacaaaaattagccgggcatggtagtgggcacctgtaatcccagctacttgggaggctgaggcaggagaatcgcttgaacctgggaggcggaggttgcagtgagccaagatcgctccactgcactccagcctaggtgaaagagggagactctgcctcaaaaaaaaaataaaataaaataaaataaaataaaatactggtagtactctaaaaaagtcaatttgttgatcccaaattgttgatcccaaatgcggatagtgccccgcaatttgaaaaacactgattagaaaatacattcaaaagaaggttctgtttcaaatctggtaaaaagccatttcccctgaagctgccacttatttagaatccttccagtgaccagtgatggtataatctacagctttgaaaaagagatagctatggaaaggaaattcgttgtgaggaatggagcccctctcatatgccagatattgtatatactttgcatgacatacattcttctctagagaagttcacatcctacagaacagggtatccatgaaatatgcaaaacatacaggtgtggatagatactgctagatgagcacataattgaaggattaatctcctttatcatgcaggaaaatgttattattataatgatcttttttaccctttaaagctattctcaggatcaaagattgacagttcagcttctgaattaccctgagacatttgaccacattaaaaacattctctattaccaggccttttgcagagctctagaggagtaatgagcaccttacttctctcctggaggtcaggaatatgcaaatccagagtcagagtgagctgtcactctggccaggtactgcagattggaacagttaactgcgtctgtgaagtagctccacttgagactatgattggggttcagttttcctcctcaattaatatcttgctcttaaaagacagtgacatccacaagatatgtagcacaaactacagacaagtgtccttcagattaactgaaccatcattattttccaaattaatccctaagtttttaactatttggcaagcatgtaaccaatttgttgggctgacttaagggtgctgactttaagtaaatgaaaataccaattattaaatgaaaagccaatttttgaaaaatgtccgtataagataatatgtggtaaaattatttttttcataaatatactacaagttgaagctgaaagcatgctaccctgcaaacataattaaagttgagagttaggattagatttgggtgatttatttgaaatgtgaggcaagtccaatatccttttgttattaaagagaacttggctgtggctcctacttaacaaattttggcaaactgaatgctgtcttgatcccctccatgctaaatttatttattgagttgcttgcagaaatttccttagcttctatattagttggcaagggctgccataacaatacaacacactgggtaatttaaacaacagacgtttatttttccggggttctggagtttcaaagtccaaggtcaaggtgctagccaggttgatttctcctgaggcctctctcctggacttgtagatggctgcctcctccctgtgtcttcacatggtctttcccctatactagtctgtgttctaatctcctcttataaggatactagtcatattggattaagacctacccaaatggcctcattttaacttagttacctctataaaggccttatctctaaatatggtgctgtcaattctgaggtgtacgcggggttaggacttcaacctaggaattttgggaggatgctgttcaacccctaacagcctcagtaaagcttgtttcaatcatggttacaggatgtgaggagcaaaaagaccactgcagtgcttgaccctctgccaggtttctaaacggcatgggtttctgttctttttgtttttttccaccctagggagaactaatgccgacgtgatgaccgccctgtcccagggctacaggatgccccgtgtggagaactgcccagatgagctctatgacattatgaaaatgtgctggaaagaaaaggcagaagagagaccaacgtttgactacttacagagcgtcctggatgatttctacacagccacggaagggcaataccagcagcagccttagagcacagggagacccgtccatttggcaggggtggctgcctcatttagagaggaaaagtaaccatcactggttgcacttatgatttcatgtgcggggatcatctgccgtgcctggatcctgaaatagaggctaaattactcaggaagaacaccctctaaatgggaaagtattctgtactcttagatggattctccactcagttgcaacttggacttgtcctcagcagctggtaatcttgctctgcttgacaacatctgagtgcagccgtttgagaagaaaacatctattctctccaaaaatgcacccaactagctctatgtttacaaatggacataggactcaaagtttcagagaccattgcaatgaatccccaataattgcagaactaaactcatttataaagctaaaataaccggatatatacatagcatgacatttctttgtgctttggcttacttgtttaaaaaaaaaaaaaaactaatccaacctgttagattttgcaggtgaagtcagcagcttaaaaatgtctttcccagatttcaatgatttttttccccctacctcccaaaatctgagactgttaaaacatttttcttctatgaacactgctcagacctgctagacatgccataggagtggcgtgcacatctctctctcttccagcaggaggagcccgtgagcacgcacagctgccctgtctgctcacccgaaggcaccgggctcacctggacctcccaggaaagggagaagagcctcagaaactgctctgtgtttagaaggaatatttttaagagtccagctttttcatttccacaatttcctatatccagatttgttttgacaatgtagtttggaagaactaagattctaatctctgaagaaccttatagggccttctaaaacataagagtttcctttgttgcttcaaatatttgaacattatgttaaagatcaagtattaattttagttgtactctagaaagctaaagtgccacattcggggctatttttatgattcagcaatcttttctaaattgtgtagcatgtgtatgagactatttatacccaaggatatgaaggaacataagtgactacaaggctctaataagccacggtggcaggaggttcaagcggttctgttcactaaatttttctcctgtaagctttgaatggaaacttctgtatcacatgatgtgtttcacttatgctgttgtgtatatacctaatatttctatttttgattttattttaatacacctcgtccaataacatctcaagctttttatttgcatttacattttcagctgtggtcagtgtaaaaattggtcatcagctgggggcggggtggttagaagtgattcaacagagctacatgctttaaacttgcccaagttctacctccttcctttgaacatttcagattggagaaccaaggagttgattgcctgaacacctgaacatccgtttatgggggccagatagaatttgttttcaaataggcttaacaggcatcattaaaatttcattctgtgtgttttgtttaggcttgaggtgcttagaagatgggataaaatattctacttttttctaaattttaactttgtttcctatgtgatttttttaaatgtcctttctaaaatattctaaaattattgattcacaagtgccatgttcagaactatagaatattactgttacataatgtctgcacagctggtcccttgattcagtggtaaggtttttgtgtacacccccctgcttgcattttatttcagaaccacaagtattacccaatatgttacatggagaggaactataaagaatccctaaggcaaaaagaagtctctagaaaatgactagaggttttttttttagcataacaaatttatttaaagaaaattattaaatttatcttcgccttgttttgcttctcccagttcctcctcttcttgccattttccacttgtctttccctcccaatcaagcctgtgatccttacctccatgtgggcccttcaccagcttgggcctcatctctggtgtccagcatgtgtggaagtcacacgttcccttgatgaacagcacacacagtctccttacttagctataggtttccagcctccctgtgacagacaggcataatgaggggctgaataggtgtttgtagcattttcgggtatccagtggtgtgcaaaatggctcatgtcatcacacctcaggttattgtagagaactggaaagacagaatccatactccctaccgccaagattctgacttagctgttgtgcagcgggagatgtatgtcagtctattttaaaagcttctccagtcagctagacacagtggctcatgcctgtaatctcagcactttgggaggctaaggcaggaggatcgcttgagctcaggagttagacaccagcctgagcaatatagcaagtctctacaaaaaattttaaaaattagctaagtgtggtggcacatacctatggtcccagctactcaggaggctgaggtgggaggattgcttgagcccaggaagtcaaggctgcagtgagctatgatcgtgccactgcactccagcctgggcaagagtgagaccctgtctcaaaaaaaaaaaccaaaaaaacaaaaaaacccttccctggtgaatataatgtatgctcagtcttgagagtcaccatttggtttgacccatattacaaagcccagccttctttttcctcagatggtttcatttctcaaaggggagtggaagagaaggaaggaggaaaaaaacgtgccttccttcctggtgaacatgaagctcactgaacctaaaggagactcacaggctagaaaccagtgtccttagtagtaggggccacctggggcttccgtggcttctccaggcatacctcctgaggttccacagaatccccttgcagaaagtacttctgatgagccactgggaacgtgtactgtccaagcccccttctaggggaaattcactgccacagaagccagcagccctggctgtcccaagggtgcataaaaggataataactaaaaggagggaattaattttgttgcctacaccagggatagatcgagggcactgaaagcatcataagtataaactcatctccacgtcagcttgtggagtctgctttctcgctctctcttttttttttttttttgacagagtctcactctgtcacgcaggctagagttgcagtggtgcgatctcagctcattgcaacctccccctctctggttggagcgattcttctcctgcctcagcctccctagtagctggaactacaggcacacaccatctcgcctggctaatttttgtatttttagtagagatggggtttcaccatgttagccaggctggtctcgaactcctgacctcaggcgatccgcctgcctcggcttcccaaagtgctgggattacaagtgtgagccactgtgcccggtcggggtctgctttctctttattccccgtcctctcacaaactacatccaggggcggtagctgctaaaaggactcaattctgcaacctcagcttctgacaccttcaaataaattaaatgctggtcctagggctcgctccccagctcttctgatgtcactgccaggttccacagccagttgtcggacatctcctgcttcctcagccaagaacacctctcagatgagatcaaaccgcccagctttcctcttagcatcttcctttattttccacttctggctggtggaagagagatcgtagttctctattccctacattttaactccacgaatattttagattaagtgaagtcttgctgttcttcctgatggaaatggtaattataaacatacaaagatacccatacacacattctttactcagggccctcttgtgctttggcaaatgataaaaattatctctaactcacacaacgaccctggaagatctggacaatgctatcactatttcacagctgagagatcgggagcatttaaagccacagaaggaatagattggcttcgcttcatattgtttccttgtgaaataaaaccagtgaaacacc

SEQ ID NO: 142 - DNA, 20031 bp, Homo sapiens
ttttcttaggtaagaaacggttgaactggatgcaatttttatcacagcttgtgtaagactgcctctgtccctcctctcacatgccattggttaaccagcagacagtgtgctcaggggcgttgccagctcattgctcttatagcctgtgagggaggaagaaagaaacatttgccagccaggctagtgacagaaatggattcgaaatatcagtgtgtgaagctgaatgatggtcacttcatgcctgtcctgggatttggcacctatgcgcctgcagaggtaacaataatatttttagtgttgagagttcaaaggagctagagtaagtggaagctgaccaggttgtcaggcttgtgttcctatgttactctgcatgactcccctttaaacgtcagtctttgttctgcaatgccatcttgtcacagggtcatctactgcttatttgtggcactgttttgtcttctgtttatgtttatttcacagcttgtcagagtctatacaactcagcagaaagaacacggcttgcctgctccctctcttgaagattgattgcaatgggagtggtttctctgtttctttgtatagtcgaacagatatttacttcttccaagaagatacaattcagaggaatttttatggcaaaagttagtggagacggggtggatgaaatctgttgggagagtatcactgttctgatgggcggccttgagcaccacactgtaatactagacctggcctaaagagaatttctcatgtactattctcacctctgggaaaattacctgaaacgataaaatatcctcattttaagaaaaaaaaaatactagaacctaacaaggaaaatttaaattctttttctttgttaatatgggtcaaatttgtatcaaaatattgtaacagaaaaatttcttgtttctctgacaggaaaattaatggaatagattttcttttctagacttagctatttctacactggaagaaaacttgtatctcaagactgtcttgggaatacaatgtgtgtgaatagggactagttacataaaatttgggtttcacatttctgatctatacaatataaggatttacaaagggacattttgaagaccattgacaggagtggtttactttgtaatataaattgacatggagaggaagtaaagatgaggataccactaaagctccagctttggtaagcctttgagtactcatacagcaaagaaatgatcaaggatggtatgaggagagggctgtgagacccagtatctagttccttgtaattctatgggaaaaagaaagcctctgaaatactttccagataggaaaacagtttgctttgtttctgtttttgtcatttaaaagatatactttcaaatctgtatccaaatttgttacgtaagtcaataattgtaaatttcactgcaatcatatgtttcctaaaagagttgccttgaacttatggaactgaaccccattttgctaatcacttactccttgcagtctatttcttatacaaatcaatatccttagagtatacatttttacacctactatttagttctgtcatgccgacagaatggctaatggctgtgtagaaaagacttgacataatagactgctatccatagacaggcctgtttcccatataaacctgctggtatctgataaggtggatttctcactatttcctaactgataagaatggtggctgtaagtaactgcttgtgcaaactgcggagtttctgtgcacctgctttccttttggagacttttggaagttttgtgcctgcgaagcagagtgagtcaatgtaaccagtcccagacaaaatcttagtaatggagtatgtagagagcatctcttgtagacaacagttcacatacattgacaaaatatgattccgggtaaagtcagtgcattctgtgcaatatggtgggagaggaatcacaggagcttacactgtattccttcatatttccttccatgtggctatttcctcgtgttaatttctttttttgtttgtttggtttttgttttgtttttctgagatggagtctcgctttgtcgtccaggctggagtgcagtggtgcgacctcagctcactgcaagctccgcctcctgggttcacgtcattctcctgccccagcctccccagtagctgggactacaggcgcctgccaccatgcccggctaattttttctatttttagtagagatggagttgttaaccaggatggccttgatctcctgatctcatgatccgcccagctcggcctcccaaagtgctgggattacaggtgtgagccgccacgcctggccattccttgtgttaattttaccatactaaaaataattaagattatatctataactataggttgcatcctgttaatttttccaaaaaatgactgaacctgaaattgttttggggacacttccaaactagtggtcaagcagtgatttttctgggactgcagaagttcctgctgtgcccaacctttattactaactgggaaagacccagggagactgggatgggctcatgattctacatacagaactcatccaagaaaggaggaaaagctgatttttgtgaacgtcgctacttgtgcctgaactaactctcaggcacattagtcagaaaatactacctatggttactcccccaggttcctaaaagtaaagctttagaggccaccaaattggcaattgaagctggcttccgccatattgattctgctcatttatacaataatgaggagcaggttggactggccatccgaagcaagattgcagatggcagtgtgaagagagaagacatattctacacttcaaaggtactgtgcctatgatgagcttgtgtgcacatgtatttattgtgattgtgtggaggtggcagttctatgactggatccatagtatagggtgaattgtgcttatttattacgatttattcacacttactcatgtattaaaactaatatcaaaggcaggaagtgaagatggctttctcatctttgcagtgttccaattcatgccttcaaagtgcctttactttttgagctcagcacagatcaatatggtttaacatagactatagaatcagaaaaaatcctaatcatattatattatttcttacctcctgggtgagtttcttacacttgttatgattctcagtttccattattatgttgatcatagagagagaaagcaatataagcaagctctgtgagtattaaagaataacgcctacattatctcaaattgtgtccagcccaagttgacatattaaaaactctgtttgcttcctcagtttctaaaccacaaagatacttaatcttgcccattgggctgaatagatgaaataattacactactaacatgagttgtaaaacttaccaaagataattcagataatgggtatgcttatgatttgataacaacttttaccttttgagtaatttcactctttcattcaatatatgtactaactatatatccaacatattataaagttcatcatgatatggcagaacaaaaggcatcacaagaagagagagaataattttgcctgtggtcattagttttgaagtagtagaaaatgtctaaatattaggtggagcaaactagtaaaattggctcaagttttcattacacaacttcctttctctaacctctgcagctttggtgcaattcccatcgaccagagttggtccgaccagccttggaaaggtcactgaaaaatcttcaattggattatgttgacctctaccttattcattttccagtgtctgtaaaggtaggcagcttgtgtgatcaaattaatttcacttttgttctcagcataaatattgtttttatggatatttgaactaagcattttcttaggaggacatagggattataacatagaagaagaatcctaaatctaactcctaattcctttctatgggatacattttgaatccatacttccgtgattgcatgtctataagaaaagaaagtgcagaactctcaaagcctctgcctcaaaaacttgaggaaatgatagtcatctccttgaaggcacaaggtcttagttatgattcctgatttcacctcttgggatgttcacagacacagagtttcatgaagctgtggtgtccagaaaacctgctgcacatagggtgcacaatgagtttccatcttcttgcctctttttaaggggcgagaactcagtccgggagtgtcttaaactacagaccttcatgggaaaccttgttgcttctgcttcctctcttttcacactggaggttttatttttgcttagccatgaattcttgggtcattcataacttttgtcttaaggtactgaaaactagtcaggctagttaatgcaaaagggtatattagatatgataatgggaaatcaaagccagggctacattaagaatttgataaaaactctaaaaatatatcctttctccacccttatctctgctttattacaaaaggctttttaagtatttgttccaacctttttcgttggtggcatttatggctttggagcactgtcaggcccatgttcattaccgtgagctcctgtgcatctcctaatttccaaactagccttgaaaacacctccattgaccatgattggttcatggtcctgtgcatggaacatcatatgttcagggagataaagaactctgatagtggcacctgggtaaaaagtacaatccattatatctggatatcaagatcttttgcagttgaagagaggtattgccacagagaaaattataggagcagaagaaagtcaatgaaagtcaatgatgacactccattaggaaccagaaagaggtatttatttatacatgtaatagttgtaagagattagagggagcctgtcacctgaagacattccttataccttcatatgtagtacactctgtacataccactctctggagcactgcatcacctacctcatggaggattagtgtccttaaatgtacctcagagcatggctatgtgtggagaaattgacttgtgacatcactaaactgactgcttctacttcagccaggtgaggaagtgatcccaaaagatgaaaatggaaaaatactatttgacacagtggatctctgtgccacatgggaggtgagtgtttggaggtgagagaacggataagaaagatgaggtaggatacatctgtttcctatcttcttagtacaagtatggaaaatgcaccattggatcaaaaacttaggaactttacaaaggtagtttttgtgagcagtgaggaaaaagaaatgacaggcatacaaaagagagaagtggaggagaagaattgggggtaaggaggactgggatttatttccttgccttttcactaatctctccagtttcccaaggaggaaacagaaatacttactcttgcaatcactatcttcttccccaattttctgttttattttttcccttttaagaaccacggctagctagttttattgtcatatctagacagttgttactttcacagttctgtgtcacatttatcttgatcttccacacctcacaattcctttttcccaggccgtggagaagtgtaaagatgcaggattggccaagtccatcggggtgtccaacttcaaccgcaggcagctggagatgatcctcaacaagccagggctcaagtacaagcctgtctgcaaccaggtgagcaccctcagcctcctctcctttctgttcttcatgcccctctttctgtcctattgccaagtatccattcatttagtcccacttatctttgtaaaagagaagattctagagagcaaagactctgtctcgaagggcatagagggatcttacttgtacccggcttagaaaagtcttagaaaaggtgttgtaactttgatgctgaattgtgtgttatatttatgggaggtcaattcaatcaaggaggccaaggattgtcaattagactcagggaaaggtggacttacccctaagctatgaaagatgaccagagaatggatgggtgaaggtgatttggagggaactgtgcatagatatgaagccgtgaagagatggaatgaacagtacataaggagagagtgagagcaagagaagagaaatactagggattcacatgggcttcggatgtctcagtgcctcttggtgtctctgctttcacacttcttgaccaagggcatagatacactaaaaattatctgcagacaatgaaggtcatccatggtagaaagagaaaataacctgtttatgggagatatctgttcacagtggatgaaatccacactgaggaaggttcagcagaacatggagctgacctatgactgcccccgctcctagttggctgctcttctttggagtctgtcatgcaatcagctgcttaaacacatctattctctatgtgttccttttgtagcctagagataattccatcttttccttgagtcctgactggtgattccaggcctccttgatcaaattgactgtccccaaatgttacacacatttcagcattaaagttactacacttttcccagtaaattacatttttttgttttattttatgttttaaaacttagagtcaatcagtgaagatctacagtggaaatacatatgtataaaattagtgaatttggtataatgatacggtgctgtgataatttaataaaagcattgagaaattaatgtggttttaatactagtagttccccaattttttaatatggccattttcacactttccaaaaatttgataaaaataatactggagacccatgttaccatttatattcaaaattactaacattttgcaatgttatatggagtatatctgcataaatacatataatgtttctagaacctcttcaaggtaaattgtaaagatgacaattgacccctagagacctctcaaagcatgtcacaggaatgaagatattctcccagttccagtgtcattactgtatctaagaacatcatctatagtgccctcatgtcatttggtatccagtccatatttgaatttttccttgcttaatcaaaatatcttttgtagctcttctttttttaaccagaattcaattgtttttatattgttgtattttgatatcagttaacttgtttttcccagttgttgaaggtttctgtaaattagaagttagatgagagtgttttattacattgacttaaacctttggggcaagaaaatatttttatcatgctgtgtttttcaaattgcaccacactagactgcatacaatcacagaatgccccactagtggtgaaggtagttttaaaaacttggttaagctccaacaatgatagactggattaagaaaatgtggcacatatacaccatggaatactatgcagccataaaaaatgatgagttcatatcctttgtagggacatggatgaaactggaaatcatcattgtcagtaaactatcgcaagaacaaaaaaccaaacaccgcatattctcactcataggtgggaattgaacaatgagatcacatggatacaggaaggggaatatcacactctggggactgttgtggggtggggggaggggggagggatagcactgggagatatacctaatgctagatgacgagttagtaggtgcagcgtaccaacatggcacatgtatacatatgtaactaacctgcacaatgtgcacatgtaccctcgaacttaaagtataataaaaaaaaaaaaacttggttaagctaacagtggtcagatctgttgtttttaactcatgttttctctttaacaattactagtaatctgctgggggataattctcaacagaagaagtcatattcccatgacaaattttcacatatgattgagtatacatcagtgatttgaacttttttctactgcatttctgttttcttctttgttatttcttatttgttatttccttggggtttttacataatcatttacaattttaaccacttgtttaactattcttacctgacatttaattaaaaatgatttctcaccaagtaaaaataataaactactattcctctaagtgagggtaaaggtgaacttcttccttcaattagcaatgtactgtgaacgtaattactgtaatgaccaccatcagagtagacaaagattgttgttctttttctcattgtcgcactaattactacagactcacggattcttgtgttatgatttttaatttattttactcattttttaatgctcacatctactcagcatatatatattatatatatatatatataaaatatatatgaaagaagaatgtgatcaaagactcatgagggcaagtgtaaaagacaaaagcacttgtttcatagggaacccactggtgacatttgagatatcaacatacaaatccatcatacaaaaaggaaaagtaatgaaagactgtgaaaattatcagtatttatgtgtgtatgtatattttctagttcatctatatagatatatatcatagatggcatatatgatatatatattatatgtcagatcaattagaaaacatacatatacatgtatgcatttttggtattaattaggaaactagttcttttgtctttcagacctgccctcatgagtctttgaccaaattcttgatttctggcacgatttgatgcccaaggctcaaagaatcttacctcatcccagctctgaaattggccgtgtctcgttctagtggtcggagttattgagaaaccaggatagggttcatggagttgcttgtgctcagaaatagcatttctattttcttaggagagaggggcataaaatttatttttatgaaaaagatcatttttgacaataatattctcagttcaaatttaatgctctacattattcagcttcttttactttggtgattttaatattagtgtaacttttggattatctgatgcttttccatcttgctcgtctgcaggtggaatgtcatccttacttcaaccagagaaaactgctggatttctgcaagtcaaaagacattgttctggttgcctatagtgctctgggatcccaccgagaagaaccatggtaataagagatacaggaagtttacctaaaacaccggtttgataaaaaaaatttaatcagatcatgctgtttcctggagttcactcacagctgacttggggtgagggaagaatttgcatttctgacgagatcccaggtgatgttgaggctgctgttcgggggcctcgcttgagaagctccggtgcagagtggacgccttagtctgtttagggagccgcctaacaaactgtatccccagcctcagggcctcagcctttctgcctttccttccagggtggacccgaactccccggtgctcttggaggacccagtcctttgtgccttggcaaaaaagcacaagcgaaccccagccctgattgccctgcgctaccagctacagcgtggggttgtggtcctggccaagagctacaatgagcagcgcatcagacagaacgtgcaggtgaggagcggggctgtgggcctcaggtctcctgcacagtgtccttcacacgtgtgcttcttgtaaggctctcaggacagccttgggccagctccatttccctgtatttcctatgcatgaactctttgtgtacgtcataagggtttcttctactctagcacaggagaggcaacagaggtggagagaaataggatgggatcaaaactacagatttgggttagcgttaagtcagtgatatccatatccctctgctggggccatgtccttttctttattttttataatgaagcattgattagatgttctttagtctccaactcatggcggatttttcttcttgtatgtttatgtagtataaattccttatatttattctcttagaattttatctttgcgaagtgcttgtttaactctgcctttttttttttggcgaggtggttgtgtgtctttatttttatgtgtaggagaccatatttataccaataccttaggatataagacaaacccacttaatatagaggcttaatgcaaaagcatttattgagctcaaggttccatggttagaaaattagcctgggctcagcctaaactcagtccattccttctgttcctggctgggctctcatgtgtgttcagggcagtgaggcagctctgcttcaggatgtccctggggcatctgtgtgagcgcccccctctcccatgcagttctttatcctccagccatccagcccagggttcacctcagcacagggcatgaccccaaggcagtgagtggacatgtgcaaagccttttcaggtctaggctcagagctgccaaccattgcttctgggaaattctatcacctaatgcaagttacaggacaggtcagactcaaggggtggggaaaaagacaccacctcttgttggaaggagctggaaattcatataaccaagcaagtggatacagggacatgtgattgttagagggcatgttcctaattaatctatcatttatacgatatgtgtgaaataacatattaatagttatatgtatgaatatgaatatatataaattgatatactatttcatatattcttaagaatacatccaagtctctaaagaattaatatccagaatacatgcatatatatgttttctaattagttatatacagatatatgaaatatcatatatgatatatattataaaacctatgtcacatatatgacatatatcatgtatatgtatatgtgtcactatttgctaaaacattaagtaaaatcagtgtagaaatccataggatactctgaaataatgatacagagaatgagaaagaaagtaaaaaatgacaatgaaacaattgatgaatctaggtaatggcatttactatattattttaaaaatatttttagacattagaaaacccacaaaactaaaaggaaatattatgaaataactgtggaaattatcagtatttatacatatgtgtatgttctctaattcatctagtatatatagatatatgacatatgtgttatataatatatatgttagattaactagaaaccatacatatatatgtatttattctggatattaattctttagagacttaaatgtattcttgaaataacatctcccaaattttacctgtgttgtcatattctctgtggttatgttttcacaaacaaaagtttctatccttcatgtagactaatttttcatgcctctttcttgtggttggtgagtgttgtgtcttatcctatattgggaatatcacaatatattactgtgttatcttacaaaattgttaatattctttccttataaatttggttaattctaatgggattgactttttaaatactgtatgagataaggatccaaatatgcatatctaatttttgaatttttagcaaaatttcccaccaacatttattgaaaagttcatatttgctcacataacttgatttttttacctgtaacatatatgaaatgtccatgagcaattatctggcctctcttccatcttcagttaacttatttacttttctgtactatgatgttaaaaagtaagtttcacttccagtatggtacaaatatttttctaacttcttcatttatttaataatatcttagctattcttgactaatgtgttatttaaaactttgaatcatcttattaacttccacaagcaaataaatgtttagtctcttgttgacattgtaataagcctccagatcaatgtggagagaactaaatgtttgacaatattgagatttccaatgcatgatcataatatgaatttcccacttattaatagccttttaataaatatataattaatttcataactttctctgttactgatgattttaatagtttttgataacttttcatttttgttttatggattttctaatatatagaaatattaaaagaataatgcaacaaatcttcttacctacattcatcaagtgttacattgctgtcattttttactctctttctctcattttctgtattactccttcagtttccctatggatttatacacttatttgattgaatgtattagaaagagtgacatctttttgatatttagagtctcccaaatttacatagtgagagtacccacaccttttgaatgtgaaatcgttagtatttagacaattattggcttgagtgatgttgaaaactaatttttcctattatacctgttcattggagagatagatattcaatgttattcatcaaacctactaaattatgctagacattacaaaatttgcctctagattcttgtgggtcttctaggtacatgaccctatcatgtgggcacaaagtaagctctgtttcttcttcagcttcctctgagatattctcttcatctgcagtgttgtgcagtttcaaaatattttatctgggaatggatttctgcttatttttgactggttttcattgaccacttgggtgtttagagaggtctttcataaattttggaaacgtatcaatcttttaagtattgtctctgcaccctactgtctgatgaacttggttgttcccaattggcaatgatgtaatctaaaaataattaaagttttctattactttgataggtgtttgaattccagttgacttcagaggagatgaaagccatagatggcctaaacagaaatgtgcgatatttgacccttgatatgtaagtaattttggagatggttgtcctaatttattttcagaggaggaacgtaggatgggtgttgagagtgacctccacaccaggggcacagaggccaacgtgagacagaggtgagacaggagctttctggaagtctcctcctggattcactccagagctctgttctctggcagggagagtggcctggggtcagcatgggtcaacctgtgcctctgctctcgtgactccaaggaactttccagagcagccaagatcattgctgaatctgcaccttccatgtaggcctgctgtttgtgctactgtctagtgtacacactgtggatattgcccatgtggtcgcattagatgtttccaaatctgtgcttctatcttgttcttcccaacctgctcaatgtcttaccagatcaaaggcagttccgtcaatcttgtgggccaggttccaattcccacctctttcacatggaattgcttgctggatcctgtcgatttagcatttttaatcatttcaaacctttttcgtgcctgtctttgcatgtttgcccatgagccaaacactgcatttgcctccagaaagtctgtcttagtgaagcgaataggagcacttggccttggtgttctgcaatatggagatctcagtgcagagaatgaagaaatgttaaaatcaaatgcagagtgtagatgcaaaagcaccattgttggagataatttataaccaataacagaagtttactattcctctgtgttctaaggttctaggattcatagaaggtcattcatataatgagggaaaaaagaagttatgtaactgctggcagtagggatttcaacaagtaatagagatgatgagataatgtgtgaaaaaaacaagcacaatggtacatcataagtacccaaaatttggtggatattattagtagtattttattcatttagaggaaaatacaaaatgaaaacggagatgataaaaagaaaaggaaaagtggcaagcattagaaagttttaaaaccaattaatgtttttggggatcatgaaatcaatcactagtgttattttgtagaactcaaatatggtctggagtaaaccacttgcgagcttccaagtgtttgctcttggtgtaatcaaaaaggataggctcaattccctaattaataagttgtaattgtacatgtgagcagtcatttatctgtgtctttacattttgtgttatttctgcctataaaatggtttatacattgtagctctttggatattggaccctatatcaaaaacaacaatttacatttctgaatctaaccaactatgttgcatatgataggcaggtagtaatatgtaaagtaattaagtataattgctaccagtataatcatcacactcaaaattgtttattagtgatgagcatatgtcttgcttattcctcttcaatgtaaggcagtatagttccatttttactgagaatttgaaatagaaaaggtcagtatatctctttgctctgttgacagatgtagagaaatatgtttgaacatttcactttgtgtgttttatgtgttaagttccaggcaggggaatagaattaaattattctttattttgaaaatacagatatgataaagtcacattcattaaacaaagaaacacagattctagagcagtcagaaaatgaacttcttaacatctacactagcggcagcttcctagaaatcactgcactacccgctagtaacggagtcattgccattcagagtgtgcatttttttttctctttccagttttgctggcccccctaattatccattttctgatgaatattaacatggagggcattgcatgaggtctgccagaaggccctgcgtgtggatggtgacacagaggatggctctatgctggtgactggacacatcgcctctggttaaatctctcctgcttggtgatttcagcaagctacagcaaagcccattggccagaaaggaaagacaataattttgttttttcattttgaaaaaattaaatgctctctcctaaagattcttcacctactttggtctccataacttctatgttttctttccttctgacacactagtgcccctaaattgtgatttgcctatacgtttagggccggggttggaagatgttaacaaccatttaagattcatttctgcagtgggagtgggtggagtttcaccctctgggaaaggggcaggtgacaggtatttatcagtcagtgcctctctagctcttgtaggaagaagcacacgcaggatggagtctagaggatgagcgatattgactagcaattcatgggctccctccagcagtgcgagggtcagagtttctggagccttgggaggaggcatccctgtgagggggggttagggagatgggagggcaccaggaaaagtgattagaagtcaggtatgggaaggctaaataggacagagtcgagtacatctctgcttggaaaaacatatcaacacccttttttttgaacattatatcttgctcataaaagaaaactttccacattgttttaacaaaccccacagctgagagtcaggcctgaatctttgatgtgtgcccattcacaacgttgaccctattggtttgtggtggggcagggcatcaaagacatcattgactaatcacattcccctgaatagctcatatttagaaaatattcttagattctaaaaatgtactattaatttgtgatattcagtcttttaaatattttatacattaaacaggcatagttacaaatataaaacaaaaatatcccaaagccattatgcatggcactcaagattaaaatgggaaataatacatctaataaatcaaatgttccaagacttcaaaggtcttttggaaacaggctatgtaaaacagcacactggtttcaaactttggtaaattttaagaacaactcttacaaaggcatttaattcttatacataattttcaggggacctaagttaatcagctaatcatgaagacatgattttcattttagaaaacacttttgaaaacttgggataatctcatgccttaatgatcaaagcattatgagaaggacagtggtttttaacctgggcatatgttctaacacatttactctccactattcgtactctggtagccatgttaaccccatcagagattccttctcaagccatgtctcagagctgagaggcatcccagcaagttttgcagctcacagttttttccgtaaattacttattctataaaattggagtaggccataaactttggagggccctagaccaattttttggattatttttcgtcttctatcattccgctgatcttagatattctctgcattaaatattaaatatcacttctaggctgaaaaatccccctaaaaatatttctagctcagatttttcctccaaattctgcaatagaagatcacaatgtgaactctgcatctccatgttaaagtctaatggacattcacacttagcatgtctcaaagaaatctcatgtaaaccatggccatcctgttctaccttaactttctgagtctatggaatgataatttcacatctcataaacttgactgatgtaagtgtcaagaaaagattgacattttgttaaaagttagtagtgaagtgtgtaacgcttaagcaaactttcatatttcaaatctctttagcaagtgtaactcttttttcaagatgtgaaataatcattaggtcagtcatttgtaaatagtacatctgctatggactttttccagttcttcaccatccatttttataaaactcttattgttaaaaaaaaagttactcagaatttcataaagccaaacacctgatttcaggaacacttgagatgtaagaaaattttatagggacctccaatcactaattttcctattttttctctcaaagaaatgctgaagggaggaattcaggttgaatgaaaggaaatagtaacttacagccatatagagttataaagacttcttgtaaatgtgaacatatggtaaaatataaaaacatgtatttttgaaattttggattctactcattattttacttcaatttaagatataaatgtatagaaataagtataattctaagctaatacgtatgcaatgtaggaagctgtaattactgaccaaaactatgtgaagtggagaaaacctggggaagtggatggttttagatgaaactgaagttaaattcatattgatttaaagtaaattgttataactttataaagtttttcatcatcaccacagcaatcacaaagagaataattatgaatatacgcaagaggaaatgagaagggaatccaaatgtcattaaaaaaaaatcacgccacctcacaaaatggtaacagtggatataaaggatagaaagctataaacctggtaggaaaacattgaaaatggcacaagtgactccttccctgtcaccaatgacagtcatgtgttgcataatgcctgggctatcttctgagaatggctttgttaggcaactgtgtcatggtggggacatgatagcattagagagaattctctcaaacactgtcatggccttatcaactatgcttctgtaatattctgaatccttcgctgcctttccaacagtgtttacaacggtttcctaagaaatgaaatccatttcaccaaaccacttttcttgctcatccataagaaacacttctcctttgttaaaattacatcatgagattgcaagcattcagtaacttgcaagctccaatttgaattctagttgtcttgctatttccaccacatctgcaattactttctccactgaaatcttgcattcctccaagtcatccaggagggttgaattcacttctttcaaactcctgttcaagtaaatgttttgccctcctgtcacgaatcatgaatgtttttaatggcatctagaatagtaaatctttttcagaagattttcaattttcttttcccaggttcttcagacaagtcaccatggtagctgtagacttatgaaatgtatttcctgaaccataaaacaagaacatcaaaattactctatgatccatgggaaacagaatgcatgttgtgttagcaggcatggaaagaacagtaatctctttcaacctctgtaagagagttcttggttgattaggtaccttgtcgataggcagttctaatttcaaagaactttttcttttgctgagcagtaagtcttaacagtgggcttaaaatattcagtaaaccattatttaaggagatgtggcttaaatatctaggctttcttgctttatttatagaacacttacagagtagatatagattaaatcttaaggaccctaggattgttagaatagtaaatgaacatcatatgttgtaatatagttagccagggaggggaaagatctctacaagaaataattttaaaaactactcaaagaaatcagagatatcacaaaatgacaaaacaagtacaggggcagcaaaaggtaacagatgtcaactatgagatctcatcaagaactaagaaaatggagaaaagtaccagatggcagatgggaggcagtgtgagcatgcctctcccacttggagattagtgtgtagagatttacattgtgaatttcttttcaagaaccaatgcagagacttaacagatatatgaaaaaatttcacatacactctgaagaagtctcaggcacaatcctactccatgaaataagaaaaaaccatcacatccccagattctgaggggagagagttcactccagagcatacatccccactggggatctggaaattcaggccacaagagaaggctttgatcctgtgcggacaagtgccttgagcagaatccacaggggagagctggaagtgcatggcagatatgagcacagaagctgggtgtccagccttgtgggcagaccgggagggatgtggcctgaaagccatggttattatctcagcgtgtaagctgatgatctgaggctggtcagagttctgtgcgcagactgcctggatgtaaacctggcactgttagcagagcactgcatgaatgaaaggaatgaaaatagccttgccaactgcataggtgctgggtgaggctcactgtggggggcgcacggcaagctattcaacattacgtacaggcatttgaggtcggggcatggaaaaatactgaggcagtgtgtgtatgttatttgtgctgagaatgaaactccttgaccttgaaaacaggacagggagtggtgtgtgtgctgtgataaggaatgctgaaaacggtctcctgagaatgcggtttgagtgcttttacaaggccacaggtgtctcacgacctgacctcataaagccatctagtggatgtttgtggcttaacaagccccttcaataagtacttggcggagggatgctggggggaccttcttagaagagctgcgccccacccccctccctggacagcccagctacaattgtctgagaactcactgcaagctgtaagcggcccactacttcccactcccttttttgaactcttctgtgcagcagaggcaattaaactctcctctggaacattaccccagcagcctgagaaccaccccttggcgctcacaggggctgcagcctgccttatccaaggacagttagagtgcagacccacctaaccctggacccactggtggtacccatccacccatcctggtagcttaacacaaagatacacttttaggagcttcatagcccctcttcccccattgcctgagaaaccactttccctgggcaacttagggcaagctcaaatcccactgctaccaccacagctggtgctcttttgcaagtgccacctcctagctggagaccaaccagcacagtccacacagcacctcaaggaagaataaatagaactgttcccaggaaggagaaaatgcctgcatgagctcagctgttaccactgcgtaccacaccctgaccagtcagaggtcttgagtcggtccgcatgacaagttcaccgctcgcataaccagcattcaagaaagccagcacactaagcctatctacagccagggagtctcagagtctacgtcactcccctgccacctcaatcagagctggtgctggtatccactgctgggagacttgtgctgaggtgaagcctgggctggatggctggaggatgaagaactgcacggaggagatggaggcacccagacagatgccccatggacatcctgaagcagagctgcctcactgccctgcacacacatgagagcgcagccaggaacagaaggactgggcaacattcaggcggagcccaggccaattttctaaacatggaatatgagttaaataaatggcttcgtattaaa
